United States Patent Application Publication US 2025/0170189 A1 - sequence listing, part 2

SEQ ID NO: 3 - DNA, 5442674 bp, Bacillus megaterium (residues 1,814,226-3,628,450 of 5,442,674)
  misc_difference 285093..285192: note = n is a, c, g, t or u
  misc_difference 286876..286975: note = n is a, c, g, t or u
  misc_difference 289709..289808: note = n is a, c, g, t or u
  misc_difference 290037..290136: note = n is a, c, g, t or u
  misc_difference 293723..293822: note = n is a, c, g, t or u
  misc_difference 310240..310339: note = n is a, c, g, t or u
  misc_difference 320398..320497: note = n is a, c, g, t or u
  misc_difference 334732..334831: note = n is a, c, g, t or u
  misc_difference 352540..352639: note = n is a, c, g, t or u
  misc_difference 357100..357199: note = n is a, c, g, t or u
  misc_difference 361890..361989: note = n is a, c, g, t or u
  misc_difference 365030..365129: note = n is a, c, g, t or u
  misc_difference 366366..366465: note = n is a, c, g, t or u
  misc_difference 369081..369180: note = n is a, c, g, t or u
  misc_difference 396532..396631: note = n is a, c, g, t or u
  misc_difference 413012..413111: note = n is a, c, g, t or u
  misc_difference 456124..456223: note = n is a, c, g, t or u
  misc_difference 492731..492830: note = n is a, c, g, t or u
  misc_difference 510078..510177: note = n is a, c, g, t or u
  misc_difference 1211610..1211709: note = n is a, c, g, t or u
  misc_difference 1213463..1213562: note = n is a, c, g, t or u
  misc_difference 1612216..1612315: note = n is a, c, g, t or u
  misc_difference 1660890..1660989: note = n is a, c, g, t or u
  misc_difference 1661347..1661446: note = n is a, c, g, t or u
  misc_difference 1661959..1662058: note = n is a, c, g, t or u
  misc_difference 1662572..1662671: note = n is a, c, g, t or u
  misc_difference 1664647..1664746: note = n is a, c, g, t or u
  misc_difference 1665107..1665206: note = n is a, c, g, t or u
  misc_difference 1665375..1665474: note = n is a, c, g, t or u
  misc_difference 1667606..1667705: note = n is a, c, g, t or u
  misc_difference 1960933..1961032: note = n is a, c, g, t or u
  misc_difference 1962618..1962717: note = n is a, c, g, t or u
  misc_difference 2041611..2041710: note = n is a, c, g, t or u
  misc_difference 2042037..2042136: note = n is a, c, g, t or u
  misc_difference 2042279..2042378: note = n is a, c, g, t or u
  misc_difference 2058614..2058713: note = n is a, c, g, t or u
  misc_difference 2058943..2059042: note = n is a, c, g, t or u
  misc_difference 2094217..2094316: note = n is a, c, g, t or u
  misc_difference 2094650..2094749: note = n is a, c, g, t or u
  misc_difference 2095233..2095332: note = n is a, c, g, t or u
  misc_difference 2145872..2145971: note = n is a, c, g, t or u
  misc_difference 2288718..2288817: note = n is a, c, g, t or u
  misc_difference 2289327..2289426: note = n is a, c, g, t or u
  misc_difference 2449277..2449376: note = n is a, c, g, t or u
  misc_difference 2449605..2449704: note = n is a, c, g, t or u
  misc_difference 2623807..2623906: note = n is a, c, g, t or u
  misc_difference 2624202..2624301: note = n is a, c, g, t or u
  misc_difference 2708781..2708880: note = n is a, c, g, t or u
  misc_difference 3117513..3117612: note = n is a, c, g, t or u
  misc_difference 3122206..3122305: note = n is a, c, g, t or u
  misc_difference 3154831..3154930: note = n is a, c, g, t or u
  misc_difference 3158863..3158962: note = n is a, c, g, t or u
  misc_difference 3174364..3174463: note = n is a, c, g, t or u
  misc_difference 3528856..3528955: note = n is a, c, g, t or u
  misc_difference 3628996..3629095: note = n is a, c, g, t or u
  misc_difference 3673086..3673185: note = n is a, c, g, t or u
  misc_difference 3692341..3692440: note = n is a, c, g, t or u
  misc_difference 3701369..3701468: note = n is a, c, g, t or u
  misc_difference 3735218..3735317: note = n is a, c, g, t or u
  misc_difference 3756492..3756591: note = n is a, c, g, t or u
  misc_difference 3789247..3789346: note = n is a, c, g, t or u
  misc_difference 3821065..3821164: note = n is a, c, g, t or u
  misc_difference 3823466..3823565: note = n is a, c, g, t or u
  misc_difference 3834555..3834654: note = n is a, c, g, t or u
  misc_difference 3835622..3835721: note = n is a, c, g, t or u
  misc_difference 3840732..3840831: note = n is a, c, g, t or u
  misc_difference 3845768..3845867: note = n is a, c, g, t or u
  misc_difference 3847694..3847793: note = n is a, c, g, t or u
  misc_difference 3853646..3853745: note = n is a, c, g, t or u
  misc_difference 3904833..3904932: note = n is a, c, g, t or u
  misc_difference 3916011..3916110: note = n is a, c, g, t or u
  misc_difference 3932635..3932734: note = n is a, c, g, t or u
  misc_difference 3943727..3943826: note = n is a, c, g, t or u
  misc_difference 3974728..3974827: note = n is a, c, g, t or u
  misc_difference 4033361..4033460: note = n is a, c, g, t or u
  misc_difference 4073484..4073583: note = n is a, c, g, t or u
  misc_difference 4125414..4125513: note = n is a, c, g, t or u
  misc_difference 4164179..4164278: note = n is a, c, g, t or u
  misc_difference 4320059..4320158: note = n is a, c, g, t or u
  misc_difference 4356086..4356185: note = n is a, c, g, t or u
  misc_difference 4357514..4357613: note = n is a, c, g, t or u
  misc_difference 4462059..4462158: note = n is a, c, g, t or u
  misc_difference 4469603..4469702: note = n is a, c, g, t or u
  misc_difference 4474027..4474126: note = n is a, c, g, t or u
  misc_difference 4540507..4540606: note = n is a, c, g, t or u
  misc_difference 4543512..4543611: note = n is a, c, g, t or u
  misc_difference 4773064..4773163: note = n is a, c, g, t or u
  misc_difference 4946528..4946627: note = n is a, c, g, t or u
  misc_difference 5000268..5000367: note = n is a, c, g, t or u
  misc_difference 5020301..5020400: note = n is a, c, g, t or u
  misc_difference 5378890..5378899: note = n is a, c, g, t or u
  misc_difference 5379030..5379039: note = n is a, c, g, t or u
  misc_difference 5379272..5379281: note = n is a, c, g, t or u
  misc_difference 5379719..5379728: note = n is a, c, g, t or u
  misc_difference 5380250..5380259: note = n is a, c, g, t or u
  misc_difference 5380402..5380411: note = n is a, c, g, t or u
  misc_difference 5381198..5381207: note = n is a, c, g, t or u
  misc_difference 5381593..5381602: note = n is a, c, g, t or u
  misc_difference 5381734..5381743: note = n is a, c, g, t or u
  misc_difference 5382210..5382219: note = n is a, c, g, t or u
  misc_difference 5382442..5382451: note = n is a, c, g, t or u
  misc_difference 5384627..5384636: note = n is a, c, g, t or u
  misc_difference 5384869..5384878: note = n is a, c, g, t or u
  misc_difference 5394187..5394196: note = n is a, c, g, t or u
  misc_difference 5394417..5394426: note = n is a, c, g, t or u
  misc_difference 5394595..5394604: note = n is a, c, g, t or u
  misc_difference 5394751..5394760: note = n is a, c, g, t or u
  misc_difference 5412850..5412859: note = n is a, c, g, t or u
  misc_difference 5413303..5413312: note = n is a, c, g, t or u
  misc_difference 5413760..5413769: note = n is a, c, g, t or u
  misc_difference 5424507..5424516: note = n is a, c, g, t or u
  misc_difference 5424645..5424654: note = n is a, c, g, t or u
  misc_difference 5424906..5424915: note = n is a, c, g, t or u
  misc_difference 5425369..5425378: note = n is a, c, g, t or u
  misc_difference 5425542..5425551: note = n is a, c, g, t or u
  misc_difference 5425987..5425996: note = n is a, c, g, t or u
  misc_difference 5426410..5426419: note = n is a, c, g, t or u
  misc_difference 5426629..5426638: note = n is a, c, g, t or u
  misc_difference 5427239..5427248: note = n is a, c, g, t or u
  misc_difference 5427679..5427688: note = n is a, c, g, t or u
  misc_difference 5427839..5427848: note = n is a, c, g, t or u
  misc_difference 5428327..5428336: note = n is a, c, g, t or u
  misc_difference 5434176..5434185: note = n is a, c, g, t or u
  misc_difference 5434328..5434337: note = n is a, c, g, t or u
  misc_difference 5434575..5434584: note = n is a, c, g, t or u
  misc_difference 5438370..5438379: note = n is a, c, g, t or u
  misc_difference 5442274..5442283: note = n is a, c, g, t or u
  source 1..5442674: mol_type = genomic DNA
  misc_difference 4591221..4591320: note = n is a, c, g, t or u
ttctcctcctgagagagttccagcagagcggtttaatgttaagtaatcaagtcccacgttaataagaaagcttagacgctcacgaatttcacgcagtatcatatccgcaatcttcatgtctttttcagataggctgagactttcaaaaaaatcatatgcttcttttactgagaagcgggttgtatctcctatatgcttttcgtcaatgagcaccgctaagctttcccgtttcaagcgatttcctttacattttggacaagcttgctgagccatgtacttttccatttgctcacggatataatctgaacttgtttcatgataacggcgctctacattccgaagcacgccttcaaattcgatatgattttctcttacttggccaaaatcattttcatagcgaaagtaaattttttctttaccgctgccatataatactttatcaaataaatgttccgggatatctcgcaccggcacgtccatatcgatgccgtaatgtgtacatacggcttcaagcagctgcggatagtattgagaacttgttggctcccaaggtgcaattgcgtgctgacgaagcgttaagtcatagttaggaataactaaatctttatccacttctaatttcgtgcctaacccgtcacaagttggacacgccccgtacggactattaaatgaaaacatgcggggctcaagctctccaatggagaaaccacattttgggcaagcatgatgctcactaaaaagcagttcttcttcacctatcacatcaataattactttcccttctccaaggcgaagagctgattccaaagagtccgacaaacgagcggctacaccttcttttacaacaacgcgatcaatcactacttcaatggagtgctttttgtttttttccagttcaatttcttctgttatttcacgcatttctccgtctactcgaatgcgaacgtacccttcctttttaatatcttctaacacttttacgtgggtgccttttcggccagataccacaggtgccagtacttgaagctttgtgcgttcagggtactctaaaattctatctaccatttgctcaatcgtttgagatgtaatttcgattccatgattaggacaaatcggctttcctacacgagcaaacaaaaggcgcaaatagtcatagatttccgtcacagttccgacggttgaacgagggtttctgctcgttgttttttggtcgattgaaatagcaggcgacaatccttcgattgaatctacatccggcttatccatttgacctaaaaactgtcttgcatatgccgaaagcgactcgacataacgtctttgtccttctgcatagattgtatcgaatgccaaagaagatttaccagaacctgataaccctgttaataccactaatttgtctcgtgggatttcaatatcgatattttgcaaattgtgggctcgtgcaccttttaccacgattttttccatcgccatgttttatcacccttccgcttttaattctagaatcaagtcacgaagctcagctgcgcgttcaaagttaagcgctttggctgcttctttcatttcttgttccatttcttctacgagctttgctttttcttttttgttgagcttatcaaatgccggtgcttcttcatacgtttctgtatcttctgctactactgttgcacgaattgagcctcgaacttctttttgaatcgttgtcggtgtaataccatgctcttcattgtaagcttcttgaatacttctacgacgcttggtctcattgatagcaatgtccatggagtttgtgatgcgatctgcatacataatgacatgtccattagcatttcgtgcagcacgtccgatggtttgaataagcgatcgttctgaacgtaagaatccttctttgtcggcatctaatatggttactaacgaaacctccggaatatctaaaccttcacgaagtaagttaattcctacaagcacatcatattttccaagccgcagctctcggataatttcaatacgctcgagcgtcttcacctcagagtgaagatattgaactttaatgccaatttcttttaagtagttcgttaaatcctcagacattttctttgttaacgtcgtaacgagcactcgttcatttcgcttaatccgatcatgaatttctccaattaaatcatcaatctgtccttcaattggtcgaacttcaatatttggatccaataatcccgttggacggataatttgttcaatcacatcaggtgccttctcaagttcgtaaggacctggtgttgcagaaacatgaacaatttggttaatatgctgttcaaattcatcaaatttaagcgggcggttatctaatgcggacggcaagcggaaaccatggtctactaacacttgtttacgtgcttggtctccattgtacattcctctaacttgaggaatcgtaacgtgtgattcatccacaacaagaaggaaatcttcagggaagaagtccagcagtgtataaggtgtagaaccagcgggacgaagcgttaaatgacgagagtagttctcgattcccgaacaaaagcccatttctctcatcatttctaggtcgtagcgcgtgcgctgctccaagcgctgcgcttctaaaagcttgcctgcttcttttagcttctctagctgttcttctagttctttttcaatattttgaatggcaacacgcattttttcttctctcgtgacaaagtgagatgccgggaagatagctacatgttcacgatcaccaatgatttctcctgttagagcgtcaacttctcgaatgcggtcaatttcatcgccgaaaaactcgacgcgaatacagtgttcatctcgagatacagggaaaatctccacaacatcaccgcgaacgcgaaacgttccgcgtttaaagtcaatatcatttctttcgtactgtacatctactagcgtacgaagcagctgattacgctctttctccattcctactcgaagagatacgaccatttctttgtattcttccggagaccctaagccataaatacaggatacgctggcaataataatgacatcttttcgttcaaaaagagaagaagttgccgagtgacgaagtttatcaatttcatcattaatgcttgcatctttttcaataaatgtatctgtttgaggtacataggcttcaggctgatagtaatcatagtaactgacaaagtattcgactgcattattaggaaaaaactctttaaactcactgtacaattgaccagcaagcgttttgttatgagccataattaatgtcggcttatttatttccttaataacattagacatggtgaaggtttttcccgttcctgtagcacctaataaaacttgatgctgcttaccttctttaattcctttcacaatcttttcaattgcctttggctgatcaccttgcggttgatatggggatactaattcaaactgatctttcaaatgaaggcctccgtttccattttcttgttttatctattttttattacgatatgtaaaaaccgaaaacacgaactgatattcgtattttatcactttatactcataaatgaaactaatcagtattaatcttatatagtgtttgtttgtttttattttttaccctgttactttattacccactaaattcttatactacccttttcgaaggaaatacaactctttggatgaaagcaataaaagaaagtaagctgcatgattgtttgaaaaaaataggcttttgcgccaatttctaaattatgatacagtataaaaaatatgtactgagaggggtttagtatggcaagcgttgatcaagttcttataaataactcctttataacagttgaagaatcaacttctttagctaaagtgacatctgaactttccaactacgacttcgttgtagtcacagcaagtaccttttatgtaatacaaaaagatgaacgataccttttaacaggtcatgacgaggcatcgtccataaaaaaagtaatagcggatacaaattggccttcatcttctacttctacgttagccaatttacaagccaacacaaactggaacagaccagtcctcattcaagcagaaaaccaagaaaccacaataggacttgtaacaccttcacagtggattacacatttgcagagccaaaatgagatattagcttcctattttgatacattggcagaaaccattaatgatgcagtgacagcggtcgataatgaaggaaatgtaatcttgtggaatactgctgcggaacatacgtataagattcagagagatgatattatggggagaaaaatcggagagcatttcaaagatgaatccatcattctacatacgattctaaatgaagggcgtcctgtgcgcggaacgtatcatcgtcctaatgaacaaactcacgtgctcatcaatgcatctcctattataagaaataaccgagtcataggtggagtcgcaaccgaacatgacattaccaatattgtacgattaaatgaagaaattgatgtgtctcttctcattccaaaagataatccattttcttctttcgcgggtatcagtcctgaaattaagcaagccgttgacattgccaaaaaagtggcatctacagatatgcctattttattaacaggagaacctggttctgggaaagaaatgctggctcaggccattcactacggcggatccaaacataaagaaccttttttatctttaaactgcgcgactattccatcgggactcttggaaattgagctctttggtcatcaaaaagatgtcttttcagaagatccaacaaccattgcaggaaaactcgagcaggctcataacgggacgctatttattgaagaaattgataaaatgcctcttgaaattcaagttaagtttctccgttacttggaagaacgatccttttatcacgttggaggcacggaagaaattcaagttcaaacccgaattgtagcctctaccacgacgcctttggaagagttgctaaaagccggtgaattccatgaaaacctttactatttgctgaccgtcattaatattatcattccgccgcttcgagaccataaagaagacattgaagcattaactcagcaatttgtacaggaatttagtaaaaagtataaaaagaaggctcctttcatcagctctgaagttctcgaagcctttatgcaatacgattggccaggcaatattcgcgagctgagaaatacgattgaacgaatgacttttctaagtgatcagtcgttgattacccttacgcaccttcctgacaacctgaaggatgcaagttctttcacagaagttcaaaaagaagaagattctctccaagaagctaggctaatagaagagactcttcaaaaaacctatggaaacaaaagtgcagcagcggatctgcttggcatttcacgcggcaccctttacaacaaaatcaaagaatatggattaaactaatcaaaaaattcgacacgaagccaaagatgcttcgtgtcgaattttttgatttcctatagactgaacttatttctgttttctcgctgtcatcttcccttgtgtaaataatagaagataatcataccctccggctttcgagtccgttccggacatattaaaaccgccaaaaggatgaacaccaactaatgctcctgtacattttttgttaatatataagttaccgcagtgcatggtagctaacgccctttgaattctctcttcggtttcagagaaaaaggctcccgtcaaaccgtaatcagtttcattgtaaatctcaatggcttcttcccagttagctgcttttgtcaacgcaaggaccggtccaaaaatctcttcttgcataattcgtgcttttgaatccacatctttgaatactgtaggttctacataatagccatttccgggagctttagctcccccggcaataagcttcccttcttctttgccaatttcaatgtaggccaatactttttcatacgctttttgatcaataacaggtcccatagaagggttgtcttcaggcagtccgacggttaattcttttgttaatgcggctaccttttgggcaacctcttcataaacagattctacaataatcgctcgagagccagcggaacacttttggccttgaaatccaaacgcagatgctacgatcgcttgcgctgccgcgtctaagtctgccgtttcatctactacaacgccatcttttcctcccatttcagcaatgacgcgtttcagccaaatttgtccagactgtacttttgaagcacgttcataaatgcgacatcctacttctcttgatcccgtaaaagaaataaaacgagtttgaggatgttcgactaaatattctccaacttctatgccatctccagggataaaatttagaacaccagacggaagaccgacttcctccattaattgaacaaatttcgcagcaataaccggtgcagaatcagctggctttaaaataaccgcatttccagatacaattccagctacagtcgttccagccataatggcaagcggaaaattaaaaggtgaaatgactactcctactcctaaaggaatatacgtcatctctgttgtttcaccttctaccggcgttaaaggccgatgctcattcgtttcacttaaacgaatcatttctcgcgcataaaattccataaagtcaatagcttccgcggtatccgcatcagcttctgcccagtttttccccacttcataaacgagcatggcagaaaattcatactttctttttctcatcagctctgctgctttgaataaataatcagcacgttcagcaggcgggacgtgcttccatgattgaaatgctgctgatgcttcttgcattgcctgctcagcataagctttagtgccacggcttactctcccaatcacttcatctacttttcccgggttcgtagagacaatcacttcttctgttgagattttatcctttccaatcgtgagaggatatgtttgtcccaattcttttttcactttcattaacgccgcttgcatcgcttgtttattctcttctaacgaaaaatcagtaaacggttcatttttaaaaactgagatttttgtacttactgtcatttcaaccagtcccctttaattagaaatttatttcgcgaagtttttcagcacgaaccatacgttggcgggacgttcggctaggcgtctcatgaaatacccaaaccaatcaatgccgtaaggaacataaaccctgactttatatccttcttttactagacggtcctgcagctctacgcaaattccataaagcatttggaactcaaattggtcatttgaaataccattttctcttactaatcgttttgtgtactgaatcatttcttcatcatgacttgctacagctgtatagtgaccatttaataaatgcattttaatgatttttttatagttttcatctacgtctttcttttctggaaatgatacttctggtgattctttataagctccttttactagacgtaaattagcttgatattgatgtaagtcattcatatcttgttctgtacgataaagatacgcttgaatcacaattccaacattatcaaattctttgcgtaattctttatacatatcaagggagatttggcagtgcaagtagtcttccatatcaattcgaacaaaaatattattcattctggccgtgtgtagaattctgcgcatattttccatacaaagctctttgctaatatccaatcctaaagaagtcatctttaatgataaatttgattgaacgcccgattctgcaatggcttctagtgtctgaatgcacatggcagtagacaacctggcttcctcttctgtaaaaacaaattctcctaaatgatcaagtgtaacaacttttccattattgttaagctccttagatgtttgaattgctgattcggttgagtctccagcaacaaaacgagctgcccccatcctcaatccatactttttagctaatttgttcattgaatgatttttgccaagcgactgaaacatcgttctcattaatacttccatcaatcctaaacctccttttattttttaaaattaaaaaaataaactaaattttcagattaataattttatttttctataccctcctcacatttctgtacacttatttaaataaatttatacataagtgtttaaaatattttacaaataaacatatttgtctaattaatttgattatactcgctcattaaatgaaccgaaacaatattgttataagttctaactcacttttttacacacaaaagctctccacgttgtgcagagagcttttgtgtacagtttaataataagcgattaacttatcatcaaaccaacaatctttattttccagctgctagcatgctttttgcatatataaaaccgatggctgctgaaagtaaatctattaaaataataagcggataatctgcgtaccctttatatacagaaacagctatcaacaaaagcgtcagccctgtggcaacatataagttatatgttactctagcaaacagaacaagcaatatggcgggtagaaaaactgcggcaatcgttttgacttccacaaacatttctcctttttatccgtcttttaaccagcttgtgaatcacgttttgtataattgtgtacaaacaaaatacctagttcatgatgttcgttgtcatacaatgctcgctgagtaaagcgaacttctccattttcgtcaataacttctagcttacaaaaagcacggttattaacttgtaatgcttcataaaatttatggacttcagatacagcgattccatttaccttaataatcacttctcctactttcaaacccattttctctgccggagaatgagggatgattcctaacacaaccaaaccttgtgtacgcttagtaaatagtgcgggcgctttttcatcgctcagacgctgctgcaaacgaatccactctcttcctatgatcgctagaataacaacagctacagcggcaagaggataaaaaatggcagcaatcgtaatgaccgttaatcccacgcctaatgctaatacacgcttaccggtaaattcaatagatttaaacggcaccatactttgaattcgctgataaaaaccgatagcaaaaggaacaaaaaacaggctaaatgacgttccgtcaatagataacacaggccaccatggaaacacagacgtaatggcgctgcctggaattaagacaaaaagcgggacaacccataatttttgagagtaatgagctccaatttcctgccctcttttacttttcacaatggctggagacgtaccttttgctccaaatttccaaattaaatatccttctgctaatacaagcagagacattaaaatagtcagagaaggtaaatctgcgttatgagcttgcacagaccacgtttgaataaatccttcaccgaaaccagatgccggaataaccaaggttgcaagcacagccagtcctacggtgtaagaaggagaaagccatttaaacgtccaagggccgcttatgataaaagttaaaacagctacaagtacaatcattcctatagatacatagacacctagcaacacggtaacaacggataaaatcaacccaataatgatacctggaaaaaataaatattttgcttctaaaataaaatcaaacacgcgaacatgaaaattctgacgctctctcttgacgcgagaaagacctacaaaaaacgagacgagcagaaataaataagttaacggatgtaaaaacaaacgtccgataccttttaaaagctctaatgcaaaatccattttttcaccacctgtatttttcacatttttattacaacatttacgattgattgttatgtatcataggcttctttattttatcaaaatgcatcactaaccgacaatgttgtttttactaaaaaagttccgtgctttggaaaagcacggaactttttctacttcttattgactagctagctttaaagccgtttgaagctgacgatcttcatcttttgatttaattttttctagaagttttgtttgtaaaagcgctgctgtatcttcatcgatttcacctgtagctttttgcttattggttttttggaatgcagttacagctgtttctgtctctttactaaagtatccgtctgtacgtccaggttcaaagccaaggccttttagcatcacttgagcattcttcacttggtcacctgtcatatcacgtgttaatggctttttatcaacttgaattggatttgcataataataatccggctgcttgacttctactgttggctttatacctttttcgttaatccagtttccatcaggcgttagccatttatagaacgttaattttaaattactgccgtcttccattggaacagcttgttgaacggttccttttccataggatttttcaccgactagcttgtatcctcctgcttcttttaatgccccggcaagaatttcagaagcggatgcactccctccatcaatcaaggccacaattggataatccttttgctttttcattgaagaaaccactttttgacgttcaccgttacgatcttcaatttggatatatggctttttattcgttactaatttatcaagcattttttcaacgctcgttaaatagccaccaggatttccccgaacgtctagaactaagccatcgatatttttattttcaagttttttcaactgtttcgtaaattcgtctcccgttgattcagagaatgacgtaatttccatgtagccaatttttttattgtttacatttttaacagaagaatagacggtttcaattggaatctcatctcttacaacttttactttcatcgtttctttcacgcccggtcgttgaacatctaatgtcacggtagagccttttttaccgcgaatttttaatactgcttcattcaattccagacccgcgatacttttaccatcgatctttaaaatctgatcatttggttttaatcctgctttttccgcaggagattgtttaaacggagctacgattgttacttttccatctaccatgcttacttcagcgccaattccctcaaacgatgaatcaagagactgcgtgaattgctgtgccgttttcttatccatgtaagatgagtgagggtctcctaaggtttgtaccatcccttggattgcgccatctaataattttttgtcatctacatctttgtaatattttgaagatatcagttcataagcttgcttgattttgtctagctcttccttttccactttactatcatttgaagaagttgtaaggggggtactgaccgttccagcatttgcatactgaatgccaaaatatgtaccagctgctccaacaactaaggagagtgccattaatagtgcaacgattttccgattcaagttctttcatcctcctcaaccttaagccatctcttcttattataatagatacaaccaaaactatgtaataaaaaggatgcatgtgttatttgtagcaaaaggcaccacacaaatcaagtgcgatgcctttttgttaaactatatgttgagcttgtaccacgtatgctaggaacttaaaatttaatataactttcagggtttacagcggaacttttacctttccaatcgcctttatgcaattcaaaatgcaggtgagcaccaaacgaacgtcctgtgttccctatataacctaattgttgacctttattgatagattgaccgcttgagacgctgtagctctctaaatgggcataaactgtaacccacgtctgaccttctacattgtgacgaataaatacggcattaccaaaagaagaagagtgatatgctctaattacctttccgcttgctgcggctacaactggcacactttctcctcgctttccaatatcaataccatagtgtcctcttccaaacgtttctcgatacccaaaatgagatgttaccgggccctttgctggcctcataaacgacccgcttgtaacagggggtgcctcctccgttgccccggctttttcaatttcttgctgttgagcttgtactgcatttttttgatcagctaaaatagaagcttgctcttctaatccaacggcttcttcattaaattctttttcctgatctttgagcgtttgcatgagctgattcttttcatccacttgtttttgcagctgcgcacgaagatttttaagctcttcaagcgcttgatttacttccgttagcttgttttgaacttttgtttctttctcttcttttgcctttttatcggcttcatgctgcattaacaaatcacggtcagcccctacaattgtcgaaaccgcactcactctgctaataaagtctccgaagctttcagagcctagcagtacatctatgtaatccacagacccgccattttcttgtaaagcccgagcacgtttttttaatagctcattttgtttttcaattcgtttttttacaacgtcaatctcgcttttcagcttttcgacgtcttgctttgctttttctacttcagattcacggctgcggatatctgcattcgtttgtccgacttctgaatccaagcgcgcaatctcagcttcttcatttttttgcttttcttgaacctcttttaatttctctttattttgattaatattttggttcacatcatcactttttttctctaaatcactgagtttagtagtgctggcactttgtgcataagcaattttttcattacctatccaagccgcacttagtccaactaaaactgctgctgtcattactaatgtcttacgtgtcatttgtttctccccatctgcacatatttccccgtataaacgggcattagcaagacccccattagcacttttttctatttttatgtgtaattacacaacaacctcacatttgataaacatcaaatgtgaggttgttgtaatctattatgttaaaaatctattcttattttcgcaagaacttacggatggataatgtacttccccacatcccaattagaccgccgattaacagtaacagtagcgatacttgaagcacgaatggaaaggcaggtaaaagttcaaagaatccatcaaatttaggttgaacttcattatataaaacgctgtatacaccgataataactgcaattggcacaatagaaccaagcaatcctaaaaacagaccttcaataaagaacggccagcgaataaaggagtttgtggctccaactaagcgcataatttcaatctcttcacggcgagctacaatcgtaattttaattgtatttgaaattaggaacattgctgtaaatagaagccctaaaatcagcactactccgatattacgagctactttcagcactttaaataacttttcaacttgatcttggccgtattgaacttttgctgcatacggatatttctcaatttgtttagctacttttgcgacatcagtcggctcttttgttttaacaacaaatacatcatttaatgggttttgctgttcaaacggttcaaaagcttgtccttcatcacccatactattaatcaaatcttttaactctttatctttagaagaaaacgtcaccgtatcaacttgcttaattgcatctagcttttccttcattgcttttcgatcatctgctgtcgctgcagcatcaacgtgaacgcgaatttccacatcattttcaatcaatttagcaatgtggtttaaattcatcatcaacataaaaaatacgcctacaagcaagagcgtcacggtaacagcacttgcagatgcgaatgtcatccagccgtttcttcctaaacttttagatccttcacgtaagtggcgaccgaatgtcctagccttcatatccgtattcacctcttacttcatcgcgcacaacattcccattttcaatcgcaattacgcgctttcgaattgtatttacaatttcacggttatgcgttgccattaaaatagtcgtaccgcgtttattaatctcctcaaagatatccataatttcccacgaagtctccggatcaagattccctgtcggttcgtcggcgatgacaaccttaggactattcacaattgaacgcgcaatagacacacgctgctgctctcctccagatagttcatcagggaaagaatcgattttaccctttaacttaacaagctctagcacctctagcactcgctttttaatttcttcgggactttgctcaattacttctagtgcaaaagcaatgttttcgtagaccgttaattttggaagcagcttgaaatcttgaaagactacaccaatatgacgtctaaagataggaactctgctatcttttatttttgctacatttgcaccgtttacaatgatatttcctgaagaaggcttttcttcacgatacatcattttaataaaagtggattttcctgctccacttggtcctacgatataagcaaactcaccttgattaatcttgatgctaatgccattgattgcttttacaccgttcggatacgttttatatacattttgcatttcaatcataagtaatcacctaatcaagtgtgttattttaatactatgtaaaacttgtcaaaatacgacaaaactctacaattcaaaccaaaaattcgactcttctcacgcgctttctcattataacatcactcttcgtgaaaataagccccaaaaatattacatttttatttcaaatatgacataagtaggatatttttagcaaggtatgagaatttatccttatttataattctgttgttttttgctgttcattttttacgaatatcgttagacaaagcagattcatgtctactttttttacaaacaaggtatgataaataagaaaaacgatgaggagggataacatgatcaccatttatggaagttcacgagaaaacggaaatacggaggaattagctaaagcagtcttaaaagatatcaatacggaagaagtttacttgcgccggcataccattaatcccattactgatatgcgtcacgatgaacttggatttaccaatcaacaagatgattattatgatatagcgaaaaagatggcagcgcacgacactattttatttgttacgcctctttactggtacggtatgagcggattaatgaagaactttgtggatcgttggtctgaaagtcttagagattcgacaatcaactttaaagaacaaatgaaaaataagcgcgtgtatgtattagtagtagggggcacaggtgcatctgtaaaagctcttcctcttattatgcaatttcaatacattgtcgattttattggctcttcctttagcggatacatcattggagaagccaatgcacctggagacatagcaaaagatgtcaaagctcaaaagcaagccattgtcttaaaccaagaattaaagcagctttaacacaaaaataagacgggtatccgtcttattttttctttgccagccaagcagcaactttctttgcatcttcttcattaattagtccctttggcataccgccttgaccattattgataatgttttcaatttcagcttctgagtgcttgctgcctacatgctgcaagcttggtccattcgctcctcctaaatctactccgtgacagcctgtacagtttttcttcacaatgtcttctgcactcgctgaagattcaccagcagattcatttttagagcttcctccgccgcacgcggacaaaacaagcgctagaccgattgttaacgtcagtaatacttttttcaagccttctcccccttgctgtagagttttcactctattataacctactccagaatgtttaaaacactctgtttacaaggactttgtttcaatttcatgaattctctcatcacacttatgtatacgattaagcaattgattcgtttcctaaacgttttttgtatactacgcgtgaaattgtcacactgagctcatataaaagcagaagcgggacaatgactaaaatatccgaaataaaatcaggaggagtaataagtacggatatcacaattaaagcaaaataagagagcttccttgctttagctaatcttaatgggtttagaacccctaagcgcgttaagaatagaacaactaaaggcatttcaaataaaaacccaaacggtaaacacagattaagcataaaacggaaataatgctccgccgtaaacatcagtgaaaactgatcattcgataagcccgttaaaaatgctaaaaccattggaaataaaacaagataaccgaaccccagtccgcttacaaacaaaagaaaaaagaatggaatgaaggtaatcagaaccttatattcttccttttttaacccgggtgaaacaaaccgaaatacttgataagcagctactggaagtgtaaaagccagcgcaaaaacaaatgcaatcaccatataaatccatacgatttcacttggtccaagtaccgcaagcttgccgtccaaatcttttactagccagtgataaatatcttgcacaaatacaaaactaacaataagtaaaactacaaatgcacaaagtgttttaataatacgaacacgcaattcttcaaggtgctccatcaagctcatttctcccattgtctttctctcctttctgacaagtagaaatagacgagtttcctcgtctatttccttacttacaatgtggattccttccctttttgttcagaaacggttgcggtctgcttttctttaacactttcatcatctgatacgagcccttttgctgctcctttaaattcagttaatgttcgtccaaacgctcgtccaacttccggcagcttagacggtccaaaaattattaacgcaatgactaaaataataaccaaaccagggattccaatattagaaaacatacttgacctcctttttcttacttagtttactgctgaactttttctttctttttcaactcttgtttttcatgtgctttcccgtgtgcccgcatacgatcttcctctacttccttagaaatctttagtccacgcggcacgttatttacttcaacttccgtcataccttttccatcttttttatattgaaaggaagctcgagttgaaatttctgcaccaggctctgttacaaaaggcacaacgcgataatcggcttgccatatatcaggagttaccgtacaccttacatatcctctataatcattaaaaaatgtgaggtgtggattttgacttaaaattttatccgtgtctgctcgtttatctgctccgttccctccggaagtgatggaggtgccgatgaactctgcaccaataattcttgaattaaggttagcaaaatccgcgtataagttagaagcccagttagcgtgtacatctccagttagtacaatgacgttgtccaactttttcttttcaataaaatcaatgacgcgctgacgattcgccgtatacccatcccatgcatccatgctgtatgtaggcttagcagccgttccaaattttcttggcgcaaagaaaatttgttgagccagtacgttccaatgacacgctgacttttcaagattagtaaacagccatttttcttgttcattccccaatagcgtacgtttgggatcaagagattctggcgtttgcggctttgttccgtctccgtttgcttgatcgtctctgtattgacgcgtatccaacacttgaaaagaagctaatttcccatatgaaaagtcacgatataatctcatatccgctccgtgaggcaaggatgtttgacgcaaaggcatgtgttcgtaataagcttgataagctgccgcacggcgttgaataaatgcttctactgattggcctttttcaggaattacatttgcataattgttttctacttcatggtcatcccacgtcacaatccatggaaaaacagcgtgagcagacttcaaattggcatctgccctgtactgagcatgcctgtttcgataatcttgcagcgtttgaatttctgcgctgctgtgagtacgaacgtttccgcttgcagccacgtactcgtttggtccatattcatagatgtaatcgcccaaatgaacgacaaaatctaattgttctttaaccatatgctcataggctgtaaagtacccatgttcatattgctgacacgaagcaaatgcaaacgtcatactggctacttcttcatttgctgaaggaagtgtttttgtttttccaaccgggcttaactcatggccgcttttaaatcgataataataaatatgactcggcttcaatccttttacatcaacgtgaaccgaatgagcaagttcaggtctagccacttctgttcctcgtttgacaattcgatgaaagtcttcatcttcactaagctcccattttactggaataggttgattaggcattcccccgccattcaatgggtctggtgctaatcttgtccaaagaacaatgctatctgctaaagggtctcctgatgcgacgcctagagtgaacggataacttaaaaatttaggcgctgcagctgaaacttctactgcatttaaaccaacagactgagcaattgttaagccaagtgatactcccgctacttttccagctccttgtaaaaaacgccgtctatcaaaccctttactcgaagaaaagctattctgtttcacttgctctattaattcgtttaacgatttattttccactgcacatgccccttcctcatgatttaactcaaattataaatactgtttgtaaaaggaatataaaggattgtaaagaagcacttactgcaaaacaggtatttttaaccattttatttcattgacaaaataattgaactgacgacagcaacctttaaatttcttcattttcttaattttctttttaacaatagttctttacgctcgtttttcttcatccaaattttacaaagtccaacaactaaaaaaaggcagcatacctaagtatgctgcctgcctcttaattaaatatgagaacgtaaatacgcatcgataaacggatctagatctccatccattacgctttgcgtgtttccgacttccgtatttgtgcggtgatcttttactaatgaatacggatggaatacgtacgaacgaatttgacttccccatccaatatctttttgttctccgcgaatttcagctagctgttcttgctgcttttcaatttctaattgatacagcttagattttaacatcttcattgcttgctcacggtttttaatttgtgaacgttctgtctgacaagatacgactacattagttgggaggtgagtaatacgaacagctgaatctgttgtattgatatgctgacctcccgcaccacttgcacgatacgtatcaaccttcaaatcttccgtacgaatatcaattgaaatttcatcattaaattccggcattatgtcgcacgatacgaatgatgtatgacgacggcctgatgaatcaaacggagaaatacgaacgagacgatgaacgcctttttcagcttttaaatacccgtacgcattatgacctttaattaaaagcgttacacttttaataccagcttcatctccaggtaagtaatcaagcgtttctactttgaaaccttttttctccgcccagcgcgtatacatacgtagtaacattgaaccccaatcctgtgattctgttccaccagcacctgggtgcagttctaaaatggcattatttttatcatacggctcgcttaaaagcagctgtaattcaaagtcattcatgcctgatataagctcttttaattcactaactagttcttctgctaaatcttcatcgtattcttcttttacaagttcatgagacacttgcaaattttcatatgtttcatccaagtggttaaattgatttactgcatctttcaaaccattggcttcattaataacagtctgagctgcctgctggtcattccaaaaatttggatcagccatagtctcatctaattcatcgatacgagcttgttttgtatcgaggtcaaagagaccccctaaagtccgctaatcgcttagctgttttgtcaagttcttgcttaatttctactaaatccatgagttgaacacctctattttatttttgacgcacaggaaggaaatgagaagactcatttccttcctgtactaattcattctatactaattgactcttactttatgattctttaccgcagcagtttttatactttttgccacttccgcagatacaaggatcatttcggccaacttctattgcatttacttttggcttcttcttagccggcgcgtctccttcttttggatgaacagccgcctgaccttgcgctacctcttgacgctcaaggttgttgttaatttctgctttcatgatatacttcgtcacttcttcttcaatgcttgcaatcatattttcaaacatcgcaaaaccttccatttggtattcgcgaagaggatctgtttggccatacgcacgaaggtggataccttggcgaagctgatccatcgtatcgatatgatccatccatttagaatcaactgctctaagaacaacaactttttcaaattcacgcatttgttcttcagggagctgctcttctttttcattataacgagcttttgcatgatctaccagcagttctaccatttcttcaggctctttacggcgaagatcttcttctgtgacttcaccttcctcaagaacattagcatttacgtaatcaataatcgcttgtaaattccattcttcttctaattcttcacgcggtgtgtttacttcaaccacacgctgtagagttgattcaatcatacgttctacaatcgcacgcaggttgtctgaatcaagtacttcaaagcgctgtttgtaaataacttcacgctgttgacgaagcacgtcatcatattgaagcaattgtttacgcgcatcgaagttattaccttcaacgcgtttttgagcggattcaacagctcttgttacaattttactttgaattggctgtgagtcatccataccaaggcgatccatcattgccatcatattatctgaaccaaatcggcgcattaattcatcttccatggatagatagaattgagatacccctggatccccttgacgtccagcacgtccgcgaagctgattatcaatacggcgtgattcatgacgctctgtaccaattacagcaagacctccagcttcaacgacaccttcacctagtttgatatctgtaccacgaccggccatatttgttgcgattgttaccgcacctttgtgacccgcattttcgataatatccgcttcacgctcatgctgttttgcatttaaaacgtgatgaggaatgccttttttctttaataaagctgataaaatttcagatgtttcaatcgcaactgtaccaacaagaacaggctgtccttttgcgtggcgctcagcaatatcatctactaccgcattaaacttgccttccattgacttataaattaaatctgctttatcatcacgtgaaattggcttgtttgtcggaataacaacaacgtgcatattgtaaatattacggaattcttcttcttccgttttagctgtacccgtcatacctgataatttttcatacatacggaagtagttttggaatgtgatcgtagctaacgtcatgctttcattttgaatctcaacattctctttagcttcgatagcttgatgcaagccgtcgctaaaacgtcttcctttcattaaacgaccagtaaattggtcaacgattacgacctgatcttcatcaattacgtaatccacatcattttgcatcgttacatgtgctttaagcgcttggttgatgtgatggtttagcgctacgtgtgaaatatcaaataagttttcaatgccaaatgcgcgctctgcttttgacataccttcttcggttagctgaacgctttttgttttgatatcaaaagtaaaatcggtttctttatcaagcgtgcgaacgaatgcattagcttgaatataaagagcagtcgatttctgcgcgctgccggatataataagcggcgtacgtgcttcatcaattaagatagagtcaacttcatcgattacggcaaaatgaagcggacgttgaaccatttgttctttgtaaagcaccatgttatcacgtaaatagtcaaatccgagttcattatttgtactatacgtaatatccgctgcatatgcttcttgcttttcttcacgcgttaaatggtttaaatttaaacctactttcaagcctaggaattcatataaacgacccatttcactagcgtcacggctcgctaagtattcattgactgttactacatgtacaccttttcctgtaatggcgtttaagtatacaggcatagtagctgtcaacgttttaccttcacccgttttcatttccgagatattcccttcatgcagagaaataccccccattagctgaactttgtacggatacatgcctaacacacgtttcgctgcttcccgtacaaccgcaaaagcttcatctaataggttatcgagcgattcgccattttggtagcgttgttgaaattcagccgttttttcacgaagctgatcgtctgttaaagacgctatttcaggacctaacgcatcaatttggtccgccattttttctaaacggccgatttggcgctgattgccgtcaaacacttttttaaataatccaagcatattaaaacgctcctctatttataatcagtacattttatactattttcattcatatctgtatctttcattataaaacattctgagtaaaattgtaacattgcagctaaacaagtagcaacttgtaccctttttcgtctgtctctttactagtactactctattaacaagttattttctattgtgatttcccctgcctcactcttacaataaaaaaggggaatgtagaatgaatattcaatcgattacaaaagaacaagcttgggaagtccgacataccgtcatgtggcctgataaagatttcagttatattcagctgaaagatgatccattaggcattcactatggactgtttgaagaaggagagttaaaatcagttgtttccttatttataacaggtaatgaagctcaatttcgaaaatttgctactctcaaagaagaacaaggaaaaggatatggcagtcgtctactagaggaggtttttctcaaagctaagaaccttggggtacgaaagatctggtgtaacgcacgagaaaataaagtctctttttatcaggcattcaacatgaaagaaaccacgcgtgtattcaccaaatcttctacgcgctatgtagtgatggaactatttttttaagcagctaaaaagcagcgtgcggaggcacgctgcttttactttactgctcttgtttaagagagcctataatcttagtttggttcaatcaatccatatcgtccatcttttcttcgatatacaacgtttgtaatgttggtctcagcgtttgtaaacacaaagaaactatgtcctaacatattcatttgcaaaatagcctcttcactatccattggctttaagttaaatcgttttgtacgaactagctctaattcatcttcttcagttgcaactgctacgttcgcttcgctttctaatgctgcgaacagatacttctcagcgcctttttcacgcatttttcgatttacttttgttttatgtttacgaatttgacgctctaatttatctaggacaagatcgacagctgcgtataaatcactgtgtgtctcttcagctctcaatacgagatcattcattgggattgtgacttctattttttgatcgttattgtagacttttaagtttacatttacgtcagcagttggtgtttcgtcgaaataacgctctaacttaccaagctttttctctacgtattccctaattgctggagtcacctcaatgttttcaccgcgaatgttatacatcatgttcgaactcctcctttaatccattgctatacctctacaattctacaatacccgacacaatcccttcctaaactattaaaattttttgaaaatttagttaaaatttatggaacctgagaaaagtttatgaaaaaaccaaaaaaatagaccttcttcataagaagaagggttgtatttttttacgcaggattaattttttttatcgtaaaacattccatcaaacgtttttgtttcgtaagggtttacatatctgttactatgcttttttttcgcttttagcaaacggagatctaccataatttgatgccgaattaagatgagcttttgatcaatttccttattcatttcgacaattttcttaccaatcgattcattatccctactttttggcggcagtttctctatgaggtcacgtctttttaatagaagatactctaacttttgaatgccttcttctcgatttttgtcagaaaatgtttgaataagccgataaatctcatcagttagctgatataggtcgttaatcatatttatgcttgaccgccgcttccatggacttgctggcggtgaagctgcacgacttgcttccatgtatcgcggaattctgttacatattgttccgcttcatccaagcttgctgtgtcattttttgtatttgcttcaattaaacactggttaatatagtcatacatagccatcatagacttagcaacttgcacgtttgtatcaagggtaatcattaattcttgaataatattttgtgcttttaacagattcgtatttttcagctcaatatttttttcctgtatgcctgttcgtgcaagtttgataaattttaaacacccgttatacagcataagcgttaactctcctggagaagcagtctgaacagctccttgctgatacgcttgatatggattatttgctgccataaacgttcactccttcttaactaaaatattgcgataactgcgcgctttgagcatttgcattttgaatagctttttccattgctgtaaactgacgataataccggtcctctacttgtgtgagcctgctttcaaaactagtgatttggctatttacgctttttaaattccgcccaagtaaaaattgttcacttgtccatgttgaacggccagcgcgctgctcaactttggatacggtttgagtaatcgtatctcgtaaacgtcgtacaacccctttttcacttgttgtacttccacttttcataaataaatccatcacagactgaggatctttttcaattgcttcttttaatttagttccgtcgccttctatgactagcttgcctcgatcggtatagtttgcgctagttgaaatgccaatgtcggttagctgcgaaaatcctccgctcattcctgatacagaggcataccagttagaacgcatttggtttagcccgcttgataaaattgagtctccttttaacaaaccgcttttcgccttttcatcccactgctcagcttgtttatcggttagtttttctctttcttcatcagtcaaaggctgatagttccggtctctttcttccgtaatcttcccattaattttctcaatcagttcattgtatttggtcacgaaatctttaattgtatcaaatactttttgcgtatcattacttacgttaacgcgcacatctcctgtgaaattgttttgaagagtataggtaacgcctcccgttgtaaatgtattggacttacgagttgtttctagaccgtttagcgtgaattttgcgtctgttcctttggcatcaccggcgagctgtaaaaagcccgtcaaaaatcctcctgaaaaaaccatgtttgaaccatccgcactatcagcagaagataaatttcctgtatctttacgagtcatgacaactttatttgttccttcatcgaaaaaggctgaaatgcctacttttgaattgctgatttgtgtgagaagggtgtttaatgaggtggaaccgtcaaattcaaatggcgtacttcccccatcttgaatatttcctgttgctttgcctgtactatcataagttgtcacagaaaagttcagcacattttgctgatacgagaacgcttcaattgtactgccgcttgttaatgttgtaccaaacgtcatttcacctgtgtcttcgttaatgaatacttcattagaatttataattcccgccgctgttcctattcttacggtataggctttacttgtaccatccgtggtaacagatatagagtttaaagtgcctgtgttctgatttacagcagaaacagcacctttagctaatttcactgtactagtatccgcacttaatgttatggcagcttgttccactgttttctcagtccacacacttgaatccatcgacccgcgttgagaccacaagcttttcgtcggatctatactagaatcaatactagtgctaatactctgagcagcagtcgccattgtcacgtttgaaagagtataagaggcatttgctgctgaggaagtagctgctgcttttactttcgtttcatccgatgaagataccgttttggatgaataagaagactgcaaggtcatattaaaagcgagattattaaattctgataacagcaagttcatagagcgataatcatctcgctgccactctaacgtttgcttttgttttttcattttatcaataggcatacgttcagccttcattaaatcactgaccatttgatcaatatccattccacttgctagcccacttactcttaccacttaccatcaccaccgtttttttattcatctatccatcaactgttagtcataaaatatgagtgtattttttcgaatcttcttattcgttcataggttcaacacttctctattttgtatcggtaaaacaaacatttttttcataggtcaaatggtgcaagatagaaaaagctcacttatttttctacaataagtgagctttttattattggccaagcaagttcagtttctgggataaatttctttgaatatccttaggaataaggtatggtgctagatttataatatctcgtaacgaatcaatggttacagaggcagataaatttatatattcatccgttgtatctgcttgctcaaacgaaatggaatctggcaaattattgagcagagtaatttcattcatttctttatcgaccgtgacatcagaagccttatcaatatttaagcgatcccagacaagagacatcggaatcggcattcttcctaaatgcacgctattcacctttaaaacaagctttccattttcggcatttggtgttacgtcaactataaactgtgattccataaaagatactacatgtttattaatataaaattttatatgttttggaagcaacacagcttctgctccgtcaaccgtttcatcattttcgtaaaggtagctgcgcaaataatcattaacatcgctctcgcttaatcggtatcctaaaataggagagcctccgttcagttctagcgacgtcgcatgagcggacttttcttgtgccagtgaagataatgaagcagtctgatcaagtttttcaatatttctgactggactaacgaaaaagtacaacccaactaaaaggataataaatagaaaaataacagctataaattttctcaaacacatgcaccctctcaaacattcttcttggaatataataccgatttctcttttatcatacaagataaataagatgtatgtcgaaaacttgtataaaatgtacgtatataccagacgtcccaaacggtgaataagtctacgatgaataaatcaagtctttttagacttaaaaaacgacaattttagtaacttaaagtcgatttttataggaatttgataattggcacacttcttgcttattataaaggtaaggggaggaatttctatttatattttcagaatttactttattttctaatagtatttcgataattttaaaggagtgaatacgatgggaaacaaaacagaatcacacggaaagttaaagcaacgtcacgtttccatgatttccattgcaggtattatcggagccggcttatttgtaggaagcggatccgttattaatgcaacaggcccagcagcagtagtttcatatgcagcagccggactgctagtcgttctattgatgcgtatgctcggtgaaatggctatggtaaacccagataaaggctcattcgcaacatatgctcagcaaggaattggcgcatgggcaggttatgctgtcggatggctttactggtttttctggctaattgtaattgcgattgaagccactgcaggaggagcaattgttcatgaatggctcccttccgtaccaatttggcttttaagcttaatcttaacctttgcattaactttaacaaacttgttctctgtcaaatcatttggagaatttgaatattggtttgctatgattaaaattgtggcaatcgttgcttttatgggaatcggtttagctatcattttcggattaatcccaggtacatcttcacctggtctagctaatttaacgggccacggaggctttatgccaaaaggtacgaactctatctttttgggagttatcaccgttattttctcttatttcggggcggaaattgcggctattgcagctagtgaatcagaaaacccagcaaaagctatcacaactgctattcgcagtgtcgtatggcgaattttaattttctatattggttcagttgctattttagtaactcttttaccttggaactcagctgatttactaaaaagtccatatgtaactatgttagaaatggtcaatattccagcagctgcacaaattatgaatttagtcgtattagtatccgttttgtcttgcttaaactctgctttgtatacgaactcacgaatgattttatcattagctcaaaagggacaagctcctcgcgctttagcaaaagtaagcaaatcaggcgtgccggcaagagccgtatggattagcacagctgccgcatatgtatgtgctatctttagcttcgtttcgccggataaactctttttattcttagttaatgcatcaggagccattgctcttattgtgtacttagctatcgctatttctcatttacgcctgcgtaagaaaatgattcaaaccaaccagccaattaaaggaatgaaaatgtggttgttcccgtatttaacatacgtaacaattgctgttattaccgtgatcttcttatcgatggcatttattgattcgatgcgctcacagtttttcttaactcttggattaaccgctgtggttcttctttcatactcgttcatcaaaaaaacaaacaacaagcgacctgacgatcaattttccgagtcagaaaatattgcaaaataaaaaagccgcagatgcggcttttttattttgcttttgattatttctcaaccgataggtcacgatgaagatttcgaagcggctgaggagggcaaatacgtcgcgtcgcgtaagaaacgataaaaatagttaacaacccgcctaccatcgcaaatgtgcgaaacggaaacatgaccactccatcttcaatcatcggatacggaagcagcgcttttaaatgaagcagcggttctcctccacctattcgaagaacaagagacacaataaacccagccaaagatccgtaccagttagctcctttaaagaataaagcacaaaccaactgcggaaaaagtatacaatacacgaggtcccctgataaataccataaagagtagacactctcagagttcaaagcaattagagttgctcccgttccaatgataatgatagaacgtttaataactttatctaactgcgcctgtgtcgcatttggttttacaatcggacgatacacgttccaggctgccatccccgacgctgaaagcaacgaagccgctactgcagccataacggcagcagctagtcctccaagtgcaatcgctcctactaaatcgggcgttaggtatttaaatacatacgttagaatcatggacgcactctcagggcttgacgctccaaatgaagaccagtctgcactataacctatcattcctattaaagttggaggcaaggccgctaacgcgcaaaagatgccggctgtaatagatagccacattgctgctttttcgtttttagcagataacacgcgctgaaaataaatctgccatggaataccaccaaaaataagtaaaaatgtgctatcccaccattgccaatatgtatttccccatttcggatcttcccagccttttattggaggaaataaacgaagagaaccagtcatgccttctgaataagtagaaaaaacggctcccactcctcccgtattcgaaaatgcaaagggaagcaccagaaatagtcctaaaaacataatagaaagctgtaagatatcggtatgtgctactgcccacaagccgccaatcacggtgtatgcaatggcaataagtgcggaaagaatgatggaaattgaaaaactgaggcctaaaatcacaccgaatgttgttcctaaagcagttaagatagctgcgctccaaaacagctctcccagtatagctggaaaataaagaaccgtagccattttcttaccgaaacgagattctagaggatcgagcattgtcataaactcaaaccttctcatctttctagcaaaaaagataccgcctaaaatcaagctgattgaataacaccatggcgcttgagtccatgtcagccctgaggaataaacggtttcggccgttccagcaatataccctccacctacccaagtggcggtcattgtgaacattgaaatccatagcggcatagatcttcctgcaacaagcatatcatctgattttccttttttacttgcagcggctcgagcaccaataaaataaataacaccatacataatgaacattaaaatgaggcctggccaatagagatctggattatagagagaatagataaatgcgacaaccataaagatggaaaatcctataatagttgtccataagggggttagtagacggtcgttcctgtttgatttccctgaaaagtcagaagtctcattcgacttttcaggcctggcttgttgtgtgtctgaacgaaatggctttttagcattttgcatcgtctcacatcctttaaattgataaagaaatctaaagacataattgtcctctattcctttttcctaccagcatacaattaaacctaaaaatagattttttagaataaaatataaatagttggattataaataccaatgcgaaggggagaaattacgtttatataattatattaaaataatttaaattgactttttttattattttgctaagaactcataattattttcatcttccatctaaactcctttcttaatttccacattcaaaatcctttgtttctcaaggtttgtatgcaagcagatatagtactatggttaatatatctgcttgtttaagatattgtcaaaaaagtttgagtgttttcatataaaaaaagaataatattctcatagctcgtacataaaaaaaccttttgtatcaagggacatagcaatcagtgattttttattactttttgttaaattttttcttaatatccgaatgattagtctcttccagagaagataatctaataaattctgaacattttgattttttagatttgactaaattaaatagccggtgctataattcgaattgttaagaacgttaaatataaacttaacaaattctattatttggaggtcgatgctattggaacaaacactgacgcttgaaaaaatgcacataaacggcgaatgggttgaagcacgcagcggcgagaaaagagagattataaatccttttaatcaagaggttatcgctgtcgttacagaaggaaatcgtgctgatactgtagcagctattgaagcagctagaaaagcttttgatgcaggtgaatggtctaaattcacagcggcccaaagaggttctttactatttaaagtagcggaagaaattcgtaatgatcgtgaagaactcgctaaacttgaaaccttgaatactggaaaaaccctcgttgaaagcctggcagacatggatggaattgctgatgtctttcaatactatgctggattagcagataaagatggtggacagatgattgagtcacctaatcccgattctgttagccgcgttgtccgcgaacctgtaggtgtatgcagccaaattactccttggaattatcctttattgcaagcctcttggaaattggctccggcacttgctgctgggaacacaattgttattaaaccaagcgaaatcacccctttaacaactattcatatgatgaaaatttttgaaagagttggctttccatcaggcgtcattaacattgtactcggccccggtgcgaccgttggacaagaaatggcagaaagtgacttagtagatttagtttcctttacaggcggcggtgtatctggacgtaaagtcatgcaggctgccgcaggcaactttaaaaaaatcgctcttgaactcggtgggaaaaatccgaatatcgtctttgctgacgctgactttgacactgcggttgactatgcattaaatgcggtcttctttcatgccggtcaagtttgttcagctggtgcgagattactcgttcaagatgatattcacgataaatttgtttcagcagttattgaacaagccaaaaaaattaagctgggagacggcatggatgaagccactcaaatgggacccgtcatctcaaaagaacacctagctaaagtggaacattacattgaacttgggaaacaagaaggtgcttctcttgttttaggaggcaaacgtccaactcaagagtctttacaaaaaggtttattcattgaaccaactatttttacagactgtcatggagatatgaaagttgtcctagaagagtcatttggtccaattatgaccattgagcgcttcaacaccgaagaagaagcggtggcacttgctaacgatacaatctatggattagctggagccgtttggacaagtgatatgaatcgagctgaacgtgtagtgaaagcactccgtatgggaacaacttggattaacgattatcatccctacttcccgcaggctccttggggaggttataagcaatctgggatcggaagagagcttagccacattgggctagaagaatatacggaaattaaacatatttatacgaatacgaatccacagccaatgcgctggtttcaataaaattcaagggggaatgtaaagatgtttatgcgatttgaaagaatggaacgtttaaaaagttttgagatgccaacggttgtaaaacatggaattggtgctgttaagcatactggagaagaagtaaaaaacctaggtgtatctaaggttttactagtaacagatcctggtgtaaaaaaggtaggtttagcagatcctgtaatcgctagtttaaaagaagcggacgtagacgttattctatttgaccaagtagaagccaacccttctattcacgtggtagcagacggcacaaaaatgtacaaagaaaatggatgcaacggactagtagctgttggaggcggaagctcaatggatacggcaaaagctattggtgtagaagtagctcataatgctcccgtcttagattatgaagcagctgaaggaaaaaaacctttaacaaaacgtatcccccctttaacaaccattcctacaactgcgggtacaggaagtgaagtcacacaatgggctgtcattacggatcctgttcgtgagtttaagtttaatacaggtggacctttaattgctgcccacttaacaattattgatccagaacttcacgtatctatgccttcacatattacggccggtacaggaattgacgccttagctcatgcaattgaatgttatacatgccattttgcacaaccaatgacagactctgttgctttgttagctattgagtacgttggaaaatacttacgacgtgcagttgcaaatggacaggatatcgaagcacgctatggaatggcgcatgcagctatgctcgctggcctttcatatggaagtgaatctgcaggagcagctcacgcgatggctcaaacattaggaggcatttatccaattgcccatggcccttgcgtagcagcaatgctaggtcctgtaatggaatataactggatgggcgagcctgaaaaatttgcgcgcatagctcaagctttaggagttaatacacacgaattaacgcttgaagaagcagctcaagcagctgttcgtgaagtatatcaactagttaaagatgtacaaatcccttctttagaagaacaaggtgttccaaaagaagcggtttctcgcttagctcaagaagcatttaatgatccacaaacagttggtaaccctcgtgatttaactgtaaaaagttacgaatggatttataatcgctgttttgaagctacaccattaactgtataaaaatgataaaaaggctgttgattcttcaacagctttttttatttactctttcgctaattcttcatttaaaatatcgatgattcttcggtcgtcaaaaactttcactacttttttcaagaaatgataataatttttggactctataatctgcgctaaattacgctttgcttttactgcgatctcctcaggcacatcttcatcatttaagagaatctgcaacttgttttccgcttcttcgattgcctctaaattaactgaaatttctctttgccacttcttacagaaaaacgaaaaaaaggacttagaaaaatctttttctgcttcatataagtcttttcgaacaccttttttccacactttgtggaccatatcaatattttgcagtgaacgaatggatgtactcatcgttggtttactcatacccaattcttcactcatttgatctaatgtaacaggctcatccataaaataaagcatgccatacagccttcctactgaaggtgtgaccccatataaatccatcgtatcagctaaagcgctgacaactacatcttctgcttcttttaataaatcatgatactcttgaaaatcactcatttactcttctcctcttttgttaaatttatttgaattatacttaataaatttaatgatacatgataaaaaggaaaaaaacagaaatttagttcgatttttttgataaaaaagaagcctttctcttgaagagaaagacttaagacatagtggggaatactatatgtttatctttcccgatttagatattatttataccgtatatttttgattattttcaaactgatcgttttatttctttttcggtaattgtttcagcatgtcaatagcatgtaatgtaatttgagaagcacttttattttcgttacgtatttcttcataaatctcttgtctatgaatatctacagactttggagcttgaattcctaactttacttgatcaccattaactgcaaggacggtcacttcaatttcatcacctattttgattgtttcatttaactttcgtgttaaaacaagcatggactcactccttatctattcctcttactcaaataacctgtgcttcgtttcgtaagctgtattcattaaaatcacttgcttagcaagctgtttctttgtattaataataacaggcgcctgcaaattagccgttatcttttccaccgaatttgacatcgtaagcaatacgtaaacagctgcatcttccacttgttgtaattgaagcttttcgatttcctgaggttctagttgaaaatcataatctaaaaaaaactgaaatggatccgtgataataaaagctacttctttggtttgaatagactgcagaacttggaaagcttcggcttctggaagtggtaaaataacaaattcagtttcttccaaaaaacctggaatcccttgattgaatgtcagtgtttgttgattatctatttctatatctccatgatagcttgttgaaattttcatctcatcacacctttgctaattgattttttcttgttatcttttttcattgtaaaaaagctccttctgtttagaaggaactttttaacgcaagaaatctagcagcgtaggctgaataatttgagcccctactcccaaagcagcacgatgcacgctttcttgtacggttaaatccgtaatgacttgttcaatatctgcatcttcattatttgaaagcatcttagtagccgtaatttcctgtgaatcaaggcggttttcgatcagctcaagccgattgcttcttgctcccaattcagatcgctccgctaatagcgtagacagctgcgtgtctacctgtgtagaaagatcttttagtgagtttacatcattttgctcaaaagctgtttgaacattgttcattaagtcaaatgcaccttgtccaaaaatgttttcagggtgaatattgactcttaactggataccttttgagacttcaactgaaaaaggatccaggttaatattcgattctatcataccgcttgcattctcacttataggcgctgttcctacatttacaccgttaaagatatagtttcctgccacctgcgtattgcctacttgcatataatccagctttaactgttcaatttcacgtgcaatcgcttgacggtcatcactttcattcgtaccgtttaacccttgcacgaccaactccttagtgcgctgaagaatggaattgacttgttcaagtcctgattctgaactatcaaaccaagactgtgcttctgttaaattacgtttatattgatttacttcagaaagattcgaacgataagccattcctttagtagccactaccgggtcatcagaaggacgagtaattttctttcccgttgataattggttttgaagtgtttccagcttattatagctattgctaatctgttttaacgaattagccgctaacattccttgtgtgacgcgcatctttaccttcctccagttccaagaccgtttacaattttatcaagcatttcatcaatcatagtcaccatacgggcactagcgttatatgcatgctgaaactgaatcatattggtcatctcttcatctaatgaaactgcactgatagactggcgcctttgctctacagctccctgaagggtttctgaattactttttaagcggttggcttgttgggcatctactgacatttggccaataacagattgataaaagccatctagggaaacagcttgattcccggaattaataagcaccttttgacgaaattgagacaatagctgagcagtttttccatctcctttgcgaccagttccatcatccccagaggagcccgaagaagcagcagcaatattgtttgtgttttgtttaattttatcagcaataacaattccagttgcagccccttctttctgagaaatctcattaaaaaaggacataccagtatcaccatctagtgtgacaccttgttggtgcttatcattaaaccaatttacaaattcatatgccatttcatctaaatcatcaatcattgaagcgtaaacacctgttttattaccactattatctatatatccagaagcctcaattaaccctttaagttttccttgaggaaatgactcagggttccgtatctcatcccctatatgaatttccgtcacataggaatcttgatttgttttcaaactgatggcatttacttgatgagttttcccatctaaaagagtaataggcccctgagacgtttgaagctgaaccgttaccactccttctgacgttgcagaagcgttcccgctgctttttgtatactctaaagaaaccggcataaatttagaaatctcatctagcagccgatctctttcatcatacaaatcattaggcaaatagccattcggttctacgttttgtatttgttggttcacattacttatttgctctaacaaagaattcacttgtgttaccgctacgtcacgctcgttttgtaaatcactttgaaccgtttttaaagaagtagataaataagagaaagtatcgcctactgcttcggctcgttcaatcataacagacctggctcctgcttctgaagggtgtgaagctacatcttgaacggactcaaagaattgattaaaaacagctgaaagtccatcttcagtaggttcattcataatttcctccattttttcaagagcaccagcgcgcgcatcccaataccccactttaatggtttcatctcgatactgggtatctaaaaatgtatcacgtattcgctctaccgtgctggcttctactcccattcctatttggcccgcagttccagtctgattcatccctggggctggataagctgggaacgtttctaaacttactcgctgacgcgtatagcccggcgtatttgcattagatacgttatggccaatcgtgtaaagagccgcttgttgggcatccattcctcgtttagccacctgcaaaccatgaaatgttgaactcattctgctttcctccgttctttatgccttcgaattaaaaatagagtttgattgaaacgatctattatttgtttttgtgtaattgaacgaatcctctcgtttcgatggaacaagaaggtctagttcggtatgaatcagctgcaaagactgtgtgagcagctgattgtttaagtcatttgcatactttatatcttgaattatatctattagctgtttttgaaagggtatcaagatggagtactcagagaatgagcctgctatttcttcaatggagcgagcagcatgtccgcttttttccatcgcttctatacgttttgtttccagtgcagaaatagcagctatatgagattgctctttttgcaaagaagccgtcaatgcctttacatcttgtttaataataaagttcgttttctctttaacaatgacagacaaacttttgtgaagcgttacttgtttttctagtatcgtttgaatttcttgcacgttcaatcaatgtcagtccttttattttttatagaaatctacaatacttttagcaatttcttttccgttaatttcgtatgttccgctgttaatttgctgttttagtttctccaatttttcaagtctttctggagatggttcatttccctgaagtttcttcgcctcagatgaaatatgaatctgatcttgtggattctttttagagacctgttctgttttttctgattgttttttgtacggatttattccaaataagttcgatgggttaatcttcatctctctcacctctttttatatttgtatccgttatctctattcattatatcggaatttcagcctaaacctttagcatcggcaaagaagttgagaccattttcacagtccaccttaaacataggtctatagatagagaatctgcaaacactccgcacacttttactcttttttcctttcgttagaacgataggtgggacgcgtcggctcttcatttgaacgaattatctcatgattatgcttttctaacccatgtttaatttcttgagagcatgaatgacagagtttaccttctcgaatctgagcgttgcattgcatgcatggatagcttatgtttggaaagttcgttagcactaatcgaccttgtcgaataaattgatgaattaacgaatctgaaacgcccgtttctttcattacttcgtaagtcgttgctgtacgatttgctctcttcttcaagaatgaagaaacacgttgaaacagagcttcttctttgtcaaaacatgatttacatatgtttattgatccactttttacaaataaatgaccgcattccctgcaattatctaacgttcccatattcgaaactcctcatttgttttttattttactatcggtcaaatttttaaattatacatcttcatgcgcgaattaaagtgagcgaacgaactgaacgtgctccagcttcctgcaaacaatttgccgcttggcgcacagttgctcctgttgtataaatatcatcaatcaagagaaattcttgattcgtaaccattgaggaatcgactactttaaattccagtctttctgccagccgacttcgcctatttttctttgattgctttgttcctgaacagcgaacaagaggcatttctatgttgccactgatcagttcagctagcgctaaagattggttaaaccctctctcatataatctctcgtccgttaaaggtataggaactagtatagcttttggattacattcttttttataaaacttataccactgctccttgaatgcttggataatttcataatctccttgaaatttaaaacgttctattatgctttgcataaaatcattgtacgcataaagagaacggttaaaaaaagaagcatcattccatttctgacagtccatacatgtgtctagctcataatgagaagaagccaggtctgcaagagaacggccgcatcccctgcaaatgctgctgatgatgatgggacatttttgcaagcaaacagtgcaaattctgtccgttgaagaaggttttaacaatgacctccaatcgaaagaagagacaagaggttcaaaacaaatcagacatattgtcatcgatcaaccagcccttccttataagctagagcattcatatattcaatatgctcttttgcttttcgtatagacagagactgcccataatgaaaaaacaccacgtctcccgttggaaattgagcactcctccccactcttcctgaaatctgaacaagagcactttcagtaaaaatcgtttcttctgctcccaatactgcaacatctatgttgggaaccgttacgcctcgctctaatattgttgtcgttactaaaataacgagctgcccttctctaaatttcattactttttcttttcgctgggaatcttcagcatggacaccgtctaccttttccgtcaacttccgaatcatgtctgtgatcggagcaatccacttaatttgcgggacgaagataaagcattgtttcccttcatttattctttttttcagccatttctcaacattagcaggcaaagtatttgttttcatttttttcttccaattgccacaccattcaaaccggggaacaggaataagcattcggtgatagcgggctggaattttaactacttgttttttaccttgctcaacgtctttttttaatgattcatttggagtcgctgttaaataaatctttgatgcagcgtgtttagctgcttttgcaacagcatagtgcagcataggctctgtcgaatacgggaatgcatctacttcgtcaataatcagcacatcgaatgcttgataataatgcagaagttgatgagtggtggaaataataagagaggattcatgaaaacggtctgtgctgcctccatacatagccagcacagacatatccgggaatgctgattgaattcttggctttaactcaataactacatctgttcttggagtagcaatacagactttctttccgctgttcaacgctgcttcaatacctttaaataaaatttccgtttttcctgctccgcaaacagcccaaattaacagctcttcatccttttttatagcttgaatgagttcatttgaagcacgttcttgagctttagacagcattcctttccaattcatcacgctgctttttggcaggacattacttgttggtccttcccagtttataaaaggtgtgcactcacttactttccccattgcaatacatgctcggcaatagcagcactcctggtgacatctactgcatggaaatgaagcaaaataaaaggggctatcacttccacaccggttgcatttatatccgttttctttctgggtaagtgctttttgataggaaatatatccgtttagataatgttcatgaatgagagataaaggatagggagtctgagttagcagaagctgctttccgcttagagagcgctgaagatctaaagagtaggggtatgaaggatttaaaggtggagttctccacgtatcgagttttgagagaggaaaagcagctgggctaggtacttgaacgggatttagcaattcttgtttaacagtaaaaagcatatcttcattcctttccatgtttatcgtacacatctatatacgcaaaaaaaggtgttttttcctgcaaaaaaccaaatcaaatgatttggttttcgattactttttataccagcctataccgatggcaccttcacctaaatgcgtgccaatcacagcgccaaaataagaaagactccattcaatatgaggatattcttgttctaagtctcgttgaatttcttttgcttcattttcacgattagaatgaataactacagctttcataggtacattttcttttgcatcctcatcaagaagctccgtgattcgttttaacgctcgcttacgcgtacgaattttttcaaatggaacaatttttttagattcaaaatgcagcactggctttacttgaagcagactgccgataatagcctgagcagcatttaggcgacctccacgctgcaagtgagataaatcatctaccataaaatacgcacgcattgatagtttcatctcttcaaaacgcgcaatgatttcgtcaggatgtttatttaattggaccatctcggctccttcaatcgcataaaagccttgaaccatacagctgatttctgaatcaaatacgtgcacgtcaaagtcttctaccatgctacctgccgtcaaagctccctgatacgttccgctaattccactagataacgtaataacgatagcagcatcgaattgatctcgttttaactgttcaaacaactctacaaattctccgatagcaggctgagaagtggttggaagattttttgcttctttaattttttcaaaatattgatctgcagtcatatctacttcttcacgatatgtttcttcaccgaaaataacgcttagcggcaccatatgtatatgatagtttgattgaatttcctctgatatataggcggtactatctgtaataattgctgttttcataagatagggatccatcctttgttatataaaataatttcactctattctacaacatttagaattaaaatgcatgtaacgagaggtttacctattagtaaaagctccctcacgtatacatattgattaacaaaccttgaatttctccaacccgcttgagtaaatttaaactgtctttttctttttgaaggatatcatttgtcaagtctactagtttcgtatccacttctttcactaacttatatactttagtcgttcctctatgattaaatcctctttcttcatgaagttcaaaaccatttttaacggcttcgttcataaactgcttcacaagcgtcttgtatttccgcaaagaatcaatagtttgacttttcactaactgctttccctgttcttcaattttatttatcacttgagttaaatgttcataggttagttcgttttgtttcttggccattactcctgtaaatgaaaccgaaccacttacttctttttctctaatgagattcatggaagaagaaagactgttaattcgctgtacctccactatgtatctctcctttctctgttagtatacactccattcaatttagacttttagatatgctagctggattagctgaaagtttcgagaggcatctgatgcttggatatgatgattcccctttagctaacagtgatgcttatgtgctgttcataagaagacagcttgttttttcggagcgaagaggtaactttaggcgtcgcttttaacacttcattccaagcgttagaaagctgcttcatcatttgttgaacttcacataaaataaacgtatcttttttaaaattagccttaattaatcgctcagacatatagttgtacagggtatctaactgctctgcaatgatacctgcttgatatgttaagccaattcctagctgatataaaatatcgttgcactgtttaattttttcattcgctgtaaaataatcgctgtgttgaattgctataacagcttcatcaatattttgaataaatttttcatacatcatagctgttagctcttgcggagatttatgatagattaattcttccgttataaaattcagcttcatcaccttcttgtcttctttaaatcagttttctatttatttcactaaaagctaacttataaatttttaaaggacaccagttgaggtttgaataaatttttctaagacctcatatgtatctcaatgtattaaagaccttttcttacaagagcatgcatcaacttgatggacattattttgaggtatggatgctttcgtcgaagggtgtaggatccttaagattccctttatgcttaagcgaagttaaaggacgagtaaatgtgtaaaggtatcaccctttgccttcctaaaagatattttctccccttaacttatcggttgttttactctctcattaaacatgcctttttacctacaatttcaaaaaaatttataaaaagaaaaaaaaagtccgatatacctagtggtatatcagacttttgaacttatcttacttctacccaaccgtttttgattgccacaacgacagcttgagtacgatcatttacattcattttttgcaaaatattactcacatggtttttaacggttttctcactaatatataatgcttctccgattcctcggttacttttaccatcagctaacagttggagcacttcgcactcacgacgtgttaacaaatgtagtggacgacgaatctcaattggttcgtgcggataagaagacgattgtccttgagctgctagtcgacggtactcttttactaaactatgcgttactttcgggtgtaaatatgaaccaccttctgcaactactttcaccgcctcaattaacgcatccgcatccatttcttttagcagatagcctcgtgcacctgtttgtaaggcgtgagttacatatgtctcatcatcatggatagataagataataactttagcgtccggatttacttctacaagctttttcgtagcttctacaccatttacagccggcatgttaatatccatgattacaacatcaggttgatgttcttctacaaggtcaataacttcgctaccgtcgtcaccttctgcaactacttcaaaatctttttcgaaatctaaaattctttttactccttcacggaataattggtgatcgtcgattatgataattcttgtctgcatgtttgattcctccccaaatcgaacaacaaatgttttactctatattgacccctatttatatacatatctctgcctttttaagcggctataatcggtactttaatcataacaagcgtgccttggttaattttcgaatgaacagaaatagtcccatctaacaaatcaacacgctctttcattcctattaagccgaacgaattctcttttttctcttcttgattaaaaccgcagccgtcatctttgacaagcaaaatagcgtattcattgttgaactctatcttcacttggatttccgtcgcgtctgcatgttttaatgcgttcgttacagcttcttgcactaagcgaaacagtgctacttctaattttgaagcagttcgcttctcttgtccaatggaaataaacgtaatccgaggcttgccttcgttataatcttcgattgtatcaagatatttacgcagcgtcggaattagacctaagtcgtcaagtgccatcggtcttaaatcatatataattcgacgcacttcgtatagggcagaacgaaccatttttcgtaaatcccgaatttcctccattgcttcttttgcactacgttcccggtaaattcggtcaattaattccgatctcatcataacatttgcaagcatttgagctgggccgtcatgaatctctcttgacaaacgtttccgttcctcttcctgagcttcaataatccgaaagccaaaatactctttttgaatggcatcttctactatttcccctacttgttttaaatcacttgttaaataatttaacacaacggaaatttgacctactaggtgatctgcacgtttaatcgtttcttctaatgtaagcaagcgtctttctagttcatctcgacgattacgcagctgatattcgctttgctgattcatcagcagcttggtttgtaattcatgtgctttttcataagcgtcttttacttcaggctctgaataaatttgaaaatgtcggctcacatcagacaaacgctttcgagccaaccttgcctgggtttccaatttatcgccttgctctatcgtctcaagaactttcccttttaacacttctaactcttcttttatttgctgatattcttgtctggcatcttcagaaagacgatagacttcatttttactatctcccactgtgccaataatcttctcaaaaatttcatcaagtgccttacttgttaatttatgttttgacatttactcaccccaaactatactcacattcggagaaatgtctatacgttcatgctatatatagtattcgtatgacctatctgaattgtgaggataagatccatattttctccctatctgactttttatatccaaaaagtaacggttgtttttagtaccctcaaactcgacatcaatcgacgcttgactcgcgttatttgaatagattaccatttacgctcactcttcaacagtgactaactgcctgtttaaaccatttcattatttagctatgcaagcctgcacactcttttattataacgtatattctgtatagcttgttcaagtgaggttgaatttgattaattgatgtcttttcataaacattttatactaatagcaagtaaacagtacgtaaatacccgtttttcttctatttataacgctaaggaggattttttgattgttatcacaatattataccgtaaaacaagaaggttcacatgaaatcactattcaaaaatctagattcatttgtcatatgaaacgtgtaacaacggaggaagaagctcagcaatttattcaagacattaaaaaacagcactggaatgctactcataactgttcagcttacctaattggagaacgagatcaatttcaaaaagcaaacgatgatggagaaccaagtggaacagcaggcgtaccaatgttagaagtgcttaaaaaaagaggcttaaaagatacggtggtcgtcgttacgcgctatttcggaggcattaaattgggcgcaggtggcttggtgcgcgcatatgggaaatctgtttccgaagcgttaaatgaactaggtacagtcaaacgaactctcatggcggttatgcatacaaccgtcgactatacatggcttggaaaattagaaaatgaacttcgcagttccgtttatctattaaaagaaattcactacgcagatatggtagagattgaaacatttgtagaggaagctcaaacagaagcatttactgaatggatgaccgagctaacaaacggccaagcagatattcgagcaggtgagacgacctatttagaagaagatgtagaatgaattatttactcttattaaaaaacattgtacaattgataaatagcgcaactattctgatggttgcgctacttgtcaatgagtaaaaacctcgtacagatgcatagctttgacgagtttgattcatacattccaatttataacacatactaattgtcacaataagtgttcgaatatacgaataaaaggagaaaccgtatggctcaatatagacgttttcaaaaaagagtaaacaaacggaaaagaaaacgaaggctttttacattttttctgttacctatccttattttagggctttctgcgactgcttatggctcttatttgtttgttaaagctaaaacagtagcttctgattcttatgaaggactcggagatcgcgataactctcctatgcgtgatcgtaaaatcgatcccaaaaaagatgatatatccattttatttatgggcgtagatgatagtgaaaccaggaaattcgggaaatcagcccgtacggatgctttaattttggcgacctttaacgaaaccaataaaaccgtaaagcttgtaagcatacctcgagattcgcgggtttatatacctgaagtgaacagaaaagataaaattactcatgcgcatgcttacggaggtccaaaagcaactgtagaaacggtagaacatctgtttaatgtccccgttgattactatgttaaagtgaattttaaagctttcacagacattgtagactcacttgggggaatcgattttgatgtaccttatgcgatgagtgaaaaggactcaaaagatcgtcataatgctattgtcttaaaaccaggaaatcaacatttaaatggcgaagaagcgttagctgttgctcgaacacgaaaacaagacaacgatattgagcgaggaaaaagacaacagcagttgattgaagccatgattaaaaaagctgcttccattggatcactaaataaatatggaaatcttatcgaagctgttggcgataatatgaaaacgaatttaatgttcggtgaaatgctttcgttttatgattatgcttcgaaaaaagtagacatcgaaaccattaacttagacggcagcgatgaaaaaattaacggcgtgtactactttaaactagacaatgattcagtagaaaaagtaagtgaaaagctccgcaagcatttaggcattgaatcaacttcagatacaacagaataattaaaaagacctcttggatatccaagaggtctttttaattaattttttaaacgaagtccacggaccatgttgagaattggcctatatgtcttatcaactagtcctatcttttcaacgataatttcaatcgctacaaggaggatagctagtacaagaaaagatccccacattgtttgtacctttgagaagataactgccgctaaaccaaatatcgcactcattccataaataattaaaaccgtttgtctatggctgtaccctaagcgcaacaagcaatgatgcaaatgagatttatcaggagccgatagcggttgattttttacgattcggcgaataatagcaaagaacgtatctgaaattggtacccctaaaataataactggaacaatgaaggaaataaccgctacatttttaaatcctaacagagacaatacagaaatcatatagcctaaaaatagtgctcctgtatcgcccataaaaatcttagcggggtgaaagttgtaaaacaaaaatccgagcgtacttcccaatacgatgaaacccatgcttgtcacaaacacattgcccatcataatagccatacccgagatggtaatcaatacaatagaggaaacgccggcagctaatccatccaatccatcaattaaattaatagcattggtaattcctacaatccataataccgtaattggaatacttaacattccgaattctaattttccgccaaacggcaagttaatgaaatcaatttggactccaccgtatacaacaacaattaatgtcgctactagctgaccgcctaatttgattttagcggatagctcaatcatatcatctaagacaccggtaatgatgataatgatgcttccgattaaaatcggcagcgcatatttactgtcaggctgtaaaacgaggtatccaataagaaaactaaaaaatatcgccaaacctccaaggcgaggcataattttttgatgaacttttcgttgatttggtttatccgttgcacctattttaaacgccagcttcttaaccagcggagtgatcagaatagatgtaataaaacaaataaacaaggtcaaatatagcatggagaccctcctcaggtttatgttaaccaaaaccataaaaaatgtatccaactttatataattggatagtatttcaaattgcgtataacaataattacttacttattcccaaaatggattatatcacaatgattctactacttaaatagaaatttattctcaaaaattagcacatttacaaactatcaatagaaaagaattgtatttttttgtgtataaacagctgatttactttattcttatgtggttattttatgtagaacattttctttactatgctttattaaaatataagcgaactccccccttttcgtctaatttattcgtcatctctaactctttttcctttttattaagcatatttaaacctttatttttatttcatatgacccactcattatatgaacaaacttttgacctatgcatgtccactatttcaaaccacattcactgaatcgttgtccttatcttatatcatttaaaagttaaaatatagtaaaatggatagagataaaattaaacaaaaaaaggaattttatcaaaaaaatgaaacttttttcgatacggttcgtaatacatagtaggaacagcatcaatcatcttacataaagggggtgttgaatgaactatgttcggtctatctgttcaaacagtgtatttgtatggattaattatctgcggaagtctcaccttcttatacattttatttagcgatttgttagatggattatctgaagcgatacctttttttaaccccactctttttttttcttttttaacattctttagtgccagtggatatttgttcgcctatacgtcattgcaaaattatttgattatttcgatttccgctcttattgcccttctactcgttattttgctcaatgtttttgtattgattcctttatcatcggctgaagagtcccttgcttttactgaagattcgttaaaaggaagacttggtaccattattacttccgttcctgcagatggttatggagaagtatttatcgaaggggttagcggcactatttccaaacccgctgccagctttaaaaacactgctatacctttaggcagcaaagtgcttgttgtagatatacaaaggggcaacgcactcgttgtgatttatgaagaagttatcaccaatcactcattataaatagtattagggggagttttatgttttcaacacctatattagttgtcgttggaattgttgtttttttattaattgcgctgattgccgtatttattacaaaataccgtacagcaggtccagatgaagcgttaattgtaacaggaagctatctgggaaataaaaacgtgcacgtcgatgaatccggaaaccgcattaaaattgttcgcggaggcggtacgtttgtgctgccagtttttcagcaggctgagcctctgagcttgctgtcaagcaaacttgaagtatctacacctgaagtatatacagaacaaggtgttcctgttatggctgatggggtatcaatcatcaaaattggaggttctatttcagaaattgcaacggccgctgagcagtttttaggcaaagcaaaagaagatcgcgaaaccgaagctagagaagtcttagaaggtcaccttcgctcgattcttggttctatgacggtagaagaaatttataaaaaccgtgaaaaattctctcaagaagtacagcgcgtagcttcacaagatctggctaaaatgggcttaattattgtatcgtttacaattaaagacgttcgggataagaacggctatctagaatctctagggaaacctcgtattgctcaagttaagcgagatgctgacattgcaacagcagaagctgaaaaagaaacaagaatcaagcgtgctgaggctcataaagatgcccaaaaagcggagcttgagcgaaatacagaaatcgcggaagctgaaaaaatgaatcagttaaaaaccgctgaatatcgtcgcgaacaagatattgccaaagctcgtgctgaccaagcatatgatctagaaacagctcgcgcgaaacaagatgtaacagaacaagaaatgcaaatccgcatcattgaacgtcagaaacaaattgaattagaagaaaaagaaattcttcgtcgtgagcgtcaatacgattctgaagtaaaaaagaaagcagatgcagatcgttactctgttgaacaatccgcagaagctgaaaaagcaaaacagcttgctgaagcagacgccaacaaatatcgaattgaagcaatggctaaagctgaagctgaacgcgttcgaattgatggtttagcaaaggcggaagctcagcgtgcccaaggtgaatctgaagctgagattatccgcttaaaaggtttagctgaagctgaagctaaacaaaaagtagctgaagcattcgagcagttcggtcaagcggctattttagatatgattatcaagatgcttcctgaatatgcaaaacaagttgcaagtcctttagcaaatatcgacaaaattacggttgtggatacaggaagcaacggtgaaaacagcggagctaataaagtgactggctatgcaacaaacttaatgtcttctcttcaagaatcgctgaaagcatcctcaggtatagatgtgaaggaattgattgaaaacttttctggaaaaggaaatgtgcgacaaagcttgcacgaactaacggatgaaatcaagcaacaaaacaagaaagaagatatctaaaaataaaaagcatgcggattatatccgcatgcttttttaacctcttaacactcgaagaagaaacctaggtaattctaactgacgcttccatctccatggttcttttaacagtcgataaagccactctaaaccaaacttttgaaaaacagcaggtgctcggttcaatcgtcctgaaataacatcgaacgagccccctacgccttgataaacagaaggattaagtttctctttatgagcaataatccaattttcttgggctggactgcctaaagccacaaaaacaatttctgctcctgaatcattaatcgtacgttcaatgacttcttcatttttttcatagccatttaatgttccaacaattaaaatccctggaaacatctcttccaacttagctttggcttcatctgcaattccaggcttggctccgtataaaaaaatccttttaccgttattcgttgcttctttacacagcttcagcatcatatcaatacccgttacacgctcacgaatacgtccctttttgagctttgaagctaaaatcacaccgattccatctggaatttgataagtcgcttgatttaatagtgactttaattccctgtcttcttgtgctttcataattttttcagggttgattgctacaataaatgattttcggcctttatctatatcctgaagtaactttaccgctagctcatcgtacgtgtcgctacaaacgtctattcctaagatgttttccttcattaaatcacccgtatgttgattttttagttttttacaaacgaaagacaggctgttcagcccgtctttttataaagtagaaacttttgaatcaccaagtaacactacgtcaaagcctgctcctttccattgatcacgctgaatgcagtttttcgtatcaaaaataacttttgtacgcatgtgattttcaacagctgatggaagaagctctttgaactcattatgatctgttaaaataagaatcacatccgcatgtgcaacagcttcatccaaactttgcgtctgacgttcgattttattctctttgatatgaggatcaaatgctgtgtaatcaacgcccagcttttctaaatgatgaagtacatctgttgatggactttcacgcatatcgtcaatatttcctttaaaagctaaacctaaaacagctacacgtccatgttgaatgcccttttcatctagtaggcttttcgttttcaatgctgtatattcaggcattgaatcatttgtatgacgagaaagagaaataatttttgccagttctggctgaagctccgttaagaaccaagggtcaacagcaatacagtggccgcctacaccaggacctggtaaatgaatgtttacacgcggatgatagttcgctaacttaatcgcttcccacgcgtttacaccaattttttcactgatttttgccagctcatttgcaaacgcaatgttcacatcacgatatgtgttttcgattactttcaccatttcagctgttgtagcatccgttacgtgaatatttccttttacaaatgttttataaagctcaacagtcaaacgactagactcttcgttaataccaccgacaatccggtcattattgactaattcctcaaatacttttcctggaataacgcgttcaggtgaatgagaaacaaataactcactgcctaattctaaaccagtttcttttagcacaggtagcataacgtcttctactgtacgcggaggaactgtggattctaaaattactaaatttcctttacgaacgtaaggaacaatcgattttgtcgcttctcgaacatagttcaagtttgccgttttatcttcattaattggtgatggtacagcaataataaaaatatccgcctcttcagctgttgtgcctaccgtgaagtgtccgttgtcaactgctgattctaaacgttcttgtaagccgttttcttctatatgaagttgcttatttttaattaattctactgctttttgatttacgtcgacaccatgtacatataagccgtgattggcaaacataacagctgtcggtaaacctatatatcctaaaccaactacacacaatttctttgtcattgcagaaaatctcctttatatgacatgcttaataaataaaacctatctgatattatatcgaaaaatgtcatttcatgatagcatttatataaaaacatgaaataatttcttgtacttattattatgtaacattttatgagaattcatcaataaacgatataaccatcttttgtacaacgagctctaacccaaaagaactattgaaaatctccttgattcccaatagttcccctagtaaatatattttacatatgcccttctttttcgacaatttctctaaaatagctcactaactcttctcgcagcggttctctttgcagagctaaatcaattgttgctttaatgaatccaaatttatctccaacatcataacgttttccttcgaaataataagcaagaacacgttgaaattcattcaggcgtaaaatagcatctgttaattgaatttctcctcctgcgccaatctcttctctgcttaagatatcaaaaatttccggtgttaaaatatagcgccccataattgcatagccagaaggggcctcttctggattcggtttttcaacgagcgtttctacgtctaataatcctttttcaagaggctctcctttaggacctacaattccgtactttgaagtttctttcctaggcacctcctgtacaccaactacagcgcattcatatttttcgtatacgttcattaactgtttcaaacaaggtgtttctgattgaactacatcatcgcctagcataacagcaaaaggttcatctccgataaaacttcttgcacagtgaatggcatgacctaaccctttaggttccttttgacgaatgtagtgaacattagccaaattcgaaatcccctgcacttcttcgagcatgtcccacttttcctttgcggctaatgtttcttctaactcatatgatttatcaaaatggtcttcgattgctcgttttccgcgaccgcttacaattaaaatatcttcaatacctgatgctactgcttcttccacaatgtattgaatcgttggtttatctacaattggcaacatttctttaggctgtgcttttgtagccggcaaaaagcgtgtccctaatccagctgctggaataatagctttacgaatttccacttacttttcctcctgtcaatgtcaatcgtgcttattggttatagtatagtaagtctgcgattgagtatgtacacaaagtcatgttgaatccatttctttttataaagagtcatgttggattctgctttatcataacaaaagattttgtataattctatttttatcatttataatgaaaagaaaattaatcaattataaatataattttatgctccacttatgtatagaaaggaatgggattatgagttcgttttcagatcacttacagcaccaatttatacatcatttcccgtacagtgatgtacgctatcgcatgaatgcccaagcagggctagacctttaccgtacccattcattcttcattttgcacaatgatgaacagatattaaatgttaaaatcgattcgttttatgtggaactaaacaagcagctgctccctgaaagtacctgttcttgtcagcataacggattttgtgaacactgctttgcagcgtttttttatatgtactcattaatagaaccgcttgcgcccctattcaaagaatggcgaaaccatgaaaaagcagctttgactatgctatctgccaaacaagtgttaaaaaagccgaaggcaacttttcaagagtggagacaaacttttgaggagcagtatacgctttttatgcaggggcggaacgaaaatgaccgttccatttatcatgaatattatcagtactattaccgtgctttagtgaaaaaggctcctgagcacccattgctttatgctttattttgtatgtatggaggggttcatacattctataaactatcagctcaattacaggcacatcagctttctactaacatcgaggaatcattcgtatatagtcacgtctacaaaataacaaatgaaatttatgctaccgctgattcattaaagcaaatgaaatacgatggagatgcattatctattatagaggatagcattccatacatccgagaattattgcataaagatatgcctttacaatatgaacgtattgagatttatcgcgttatttggcaaaaaatcttcacgttagaaaagtggcgaaaaactgaggaaagcaaattaaaagctaagtacggttcttttataaacaatacagctctttcctatcttttattccttcaagaaaaagatggggaagcaaaagaacgtttgagcgatgaaacactacaaacaattccctatcttattccttggttaaatgatttattgcatgaaaaagaaactgaccgctttgctcagtggggctcttatataatgacctatataggagattacgtacgcaccgttccggctacttatcaaggaagccgaaacatggtctccatgattgtaaatttatttcagcactataaagacttaacgaacgagcaaactttgtatattgaagcattgcaaacattacttccctatagttttattgaatacagtgattttctatatgcttctgaccaattgaaaaagtgggttgaattacaggtgcttcttcaatatgacagcatcaaatatgacgagcaaacgatagaagccttaaaacaaaaagatgaaaagctggttattcctctttatcatcaaatgatctcaaagctgatttatgaaaaaaagaaaagcagttaccaagaagcctatatctacttacaagaattaaagagactttatctacaaatgaatcgctctctactatgggaacattatatgaaagaattagcgataaaaacaaagaaacagcgctcgtttcaacaactattagaaaaaggagatttactgaatgtttgatttgttccatttaacacttgaagtcgaacctgtacacggtgacttttttctctactgtgtatcacctagcggccaaattttgctccctgatacatggaaagatgcgctgtttctatggcatgaacagacctattacggaagcgaagccacacaggttgagattaatggaaaaaaaggaattcttctttctgcatggcaaatgttcactttcatacaattacctattcaacagcatgtgttgaaaccggctttgtccgcttcagcggaagcttatcagcaaattgcaatcgatatgacaaagaggattatccaagggaaatttcattctcttcctttaaaaaaacaaatgactggatcgctttcacaagctgatgagcaagagtggcgagcacaaattaaagagagcctattaaaaaaggaaggaaaggactttttaataagcatagaaggcgagagctataatcctccctttgacctttcattgcgtattgtagagccaacgaccgatggagatgtatggacggctgaaacattcgtgattccccacgatgaagccaaagaaccttttatactgggaagaatgcttcctaaagagtggaatcactacgaatcatatatcgcttatgaacacgagcgatggaaagcattggctcctactttataccaaaaaggagcgtttattcagtctgtcctaacagatgaggaagtatgggaatttctaactcaagatagtgcagcattgattaaacaaggtgtctctatccatttgccaagttggtgggaatcattaaaaaaagccaccataaaagtatctggtactatagaaaatacttcatctgcattgtttggtaaacaagctatcagcagcttccgctggtcattttctattggcgatcaaactttctcagaagaagagtttcggaaattagtcgaacaaaaacgccgattattatctattagcggacagtggattcaactggattctagattaattaaacaagcgcagaaaattgttaaagaagctagtaaaaaaggcgtctcaattcatgaaattttaaaaacaaagctaacctacatggcagacagtaaaaccgatgaagaagaggtaaaagttgagttccaactccccgcttcctttcaatcatttattacatccttaacggatttagaacggctgccggaagtgctgcctccctctgaatttaaaggtgcattaagaccttatcagcagcaaggtttgaattggctcatgtttttgagaaagtttaacttaggaggatgtctagcagatgacatggggctaggtaaaaccattcaattaattagttatttaacaaatattcatccgttacatagctctccttctcttatcgtttgcccaacttctttaattggaaactgggaaaaagaattacagaaatttgccccttctcttcgtgttcatgttcattacgggccgaaaagaaccaacggatacgcatttgagaagatatgtgaaagtactgacgttgtgatcacgacttatcaagttgctcttttggatgtcgaattgttgaaagggtttatgtggaacagcatttccttagacgaagcacaacatgttaaaaacccgcagactaaacaggcgagagccatccgtcagctgcaaggaagacacaaaattgcgcttactggaactccaattgaaaaccgtctgctggaactatggtcattatttgaattcatcaatcctggttatttaggaacaattaattcatttaaaaaccgatttgtagcaggtattgaaaaaggcgagaaacctgaacgaactgttgagcttaaagcactcattcagccttttttattgagaagaacgaaacaagataaaaacatcgcccgctcactgcctgataaacaagaacaaaaagaatatatcccgctgacagcggaacaagcttcactttaccaggagctagttcaaggaatgtttcaagaaacagaggaaaaaacaggatttgaacgaaaaggcataattttgcaaacactaaataagctaaaattattatgcaaccatccagctttgtacttaaaggaaagtgcagctaaacaaacggtacggcgatctcataaaagtgaaaaaattattgaactcgtagagagcattcgcacacagcaagaaagctgtttaatctttactcagtatattgaaacaggactcatgctgcaaagaaccttagaaaaagaaatcaacgagccggttttattcctccacggaagtttgtcaaaagaacaacgagatgaaatggttgctcaatttcaagcaaggaacaaagccatctttatcctttctcttcgcgcaggtggaactggattgaatttaacagctgcaaatcacgttattcattttgaccgatggtggaacccagctgttgaaaaccaagcaaccgatcgcgcccatcgaattgggcagaataaatttgttcatgttcataagtttattacaagaggaacgattgaagaaaaaattgatgaagtgatcaatcaaaaacaacatctaaacaatgaactcatacaaggagatcaatgggtaacagaactttctaataaagaactacaagagcttcttgcatacagaaatgaataagaaaaattataaaatgtgttacaactttactgaaaagaggacttttttacttgtcctctttttttattagatcattcgacacaaaaaaataagtgtaaatcattatccagctacttataaagatacaaaaaacgcaataaatagcgttttttgtataaaaaggtatttttatagagaaaaagaccctttactttctctttaaattccagcatatttatacatataatatttttgtaatttaatagacatattggaaaaataaatatgaaacatttacataattagggggatttattaatgaaaaaaaggcagctcgctttatctctaggcgccattgttggcgggacattcttatatcacgcttcagctgaagcatctgcttcaactgttcaagtgaaagctggagatacactttggtcattatctaccaaataccatacaacggtagaagctttaaaaagcgtaaataagttatcttcaaatacaattcacataggacaaacgttatcgattccttctgcttcaacctctcaaccatctaataaggaagaacagccttcagctccttctactggttcgacatataaagttcaaagcggcgataccctttggaaagttgctactcgttttaatatgagcgtagaagaattaaaacgtttgaacgctctttcttctaacattatctatattaaccaaacgttaaaagtaaatggaagcaatagcgcatcgactccaactacgagtaaaccagcagaaactccttctaaggatgcaaatggaacttacaaagttcagcgtggagatagcctatctaaaatagcttcgacatttcacatgagcgtgagtgagctaaaacaaataaacggattaacgtctaatacgatttatgtaaatcaacaattaaaggtatcaaaaagcagcgaaacaactacgccaacaacaaaaccaagtacatccacaccttcaacttctaacggaacattaaatgtatcgcaaatgatttcagaggcaaaacgttatataggtgttccttacaaatggggtggcacaactccttctggttttgactgcagcggattcatttattacgtaacgaaacaacaaatttctacaacgcgctatacgacggctggttattggagggtatcaacacccgtcagtaatccacagcctggagacttagtgttttttaatacatattctagcggtcctacacatatgggcatttaccttggtaatcgtcaatttattcatgctggatcttctacgggtgtaaccattgcaagcttagataacagctactggagcaagcgctacttaggtgcaaaaagattttctaaataattgatagaagctgaaacaaaagtattttagttgaaggaagacccgaacgagtttgattcttgatgaagaatcaaactcgttcgggttttttcattggtagggtggaagtagttttcatatatgtagggagggcaaagcgaagactcctgcgagaaaagcagaatagatgatcccgcgcgcaagtgacgaggaggctcatcagccgtccgcggaaagcgaagccttgcacggaaatcaacagtggtttaacaaatgatccatactagctcatcccatttgtttgtctttagattgcattaattcagttatgtctcaatctcttatatacagaaaaaaaccgttaaatgatttaacggctgaaatagaggaatagttcggggatagtgaatactttaattttctctcttgagaacatagaaagagccttgctcttaaaaaggatctatcttctattatgatagataagaggaattaaaaccttagctgaactaatcaccccctttcatactagataactttattcttcttgttgatttgaatcaaatgaagaaaaaccggatggctttccacttaaaaacttaacagcatcagccacaacgtcggtcatatatactcgttgctgaagattattttcaaatgtgcgcgtttgtacacgccctactacacctacaaccgctcctttatcacagtaagcagccgtattttctgcattttttctccacagagtaatgttgacaaaatcagcatcatattcaccttcaacatttcgaaacgttcgattaattgctaaagtaatagtagatactgcaatcccttcatgggtatatctaagctcaggtttttttgtcagtcttcctacaagaacaatatggttaatcatagtctaccactccaactgattgaataatgggaatctttaagctcattcatgttataatatggataacctactatttacgtaaaggaggaaacatcaatgaaaacatttaaacttgtgtcatttcaattggttgatgatcaagaaaagcgtcagtctgtctcactcactaatggccttattattaataaagaagacggcgaaaataactggattttagaagcagttatcgataagaaatggtacgatgaatttcatgttttgttgaaagataaacaaaaaataacggtagaagctaaaattacgaaagaaacaaatgatccggctacctttatagctaccgtggcttccattacttcaattggtgaaaatcgtattagtttgttgatgaaaggtgttttaaaagaacggagacttcattatgctgaaatgctcttagaggatttaattaaccaagggttatcaggtcaagatttacttcaacagttcaaactgcagcttcgaaacagaccgataaaaagtacatctaaaaaataagtcaagtcatctcaaggtgtctggatttaaaagggaggattattgtttgcggcctttttcgttggtgcatgagtagggtaaagaaaagagaactcactggagaggtacctttctttttttcctaaaaataaatgagcacaactagaacgtttgaagcgattatctcttatgcgagcgccttgccttttcaaataaaaatttgtcattttttcactcctttttctttgtaattcgtatattaatgcatttttccccgttattcaaccatttttttcaatataccgaacaaaaaataggatttttttactataaaaacctctatttttgttcttttttttatatccatgaagaaaaacgaatctttttagagaaaaaaaagaaataaaaacaggttttattccctttattgcagaaggtaaagtgtatatgtttcatattgtgcgaattcatcatgttacaaagaatatgaactacattcgaacaataagacatatatttatctttacgaaatcaggtgatgcatatgaaagattttggagaaagaattaaacagttcagactaaaaggaggattttcacaagaagaattagcaaatcagttgaatgtttctcgtacaactatttcaaaatgggaatgttcaaaacaaacaccttctatttttgattttttatctttatgtaattgttttcaaattacgctggaccaacttattgagccttcctcttataaacaagatcatttacatgacttccaacttctttacttaacaagaaaatgtgaatcggattcacatgacgagaccattttaaccctcatagataaacagcccttattgaaacatgtgctcttacaattttcatctctgtcaccaacacttcaaaaagagttgctaacggatattatacctttattaaagaaacttttttctgctttgcagcgccaataaaaaaagctgcatcagcagctcttatgtactattcttttttatcgcctaaagcaaacataatatctgtttcgcagactaactctccatctacagttgcgataccttttcctttgccaatagatccacgcgcacgtacaatttccacctctaaacgcagttgatcaccaggtcttacttgctttttaaagcggcagttgtcaatgcctgcaaaaaatgctaaacgtccttgattttcttctttttttagcatagctactgctcctacctgagccaaagcttctacaattaaaacccctggcatcacaggatagtcagggaaatgcccgttaaaaaattcttcattggcagatacgttttttaaaccaactgctttttttccctcttccacttctaaaatacgatcgaccaataaaaatggatatcggtgtggaataatttctttaatttgttcaatatcaagcataaataagtctcctttcaaaccgcatgtaacatacgatactattatcaatatacagaatgctcaattgagaagcaactacttgcttaagctctgattccattaaccaagcccatcatttgatctgcaattgaaatagagcgggaattaaattgatacgcacgttgagcaatggacatatcagtaagttctttactcaaatctacatttgactgttccaatttcccttgctctacgcctgctgtttctcgagcttttccagtcaaatctgtaaacatattcggttggttcatccctgctggaaaagcaaatagattttctcctttagcttctagcacctgcggcttttggacatttgttaacccaagtgtaaactggtcaacacccttattcgtagtaaccgttatcgttccacttccatcaatttgtatatctttgaacgcgttactgaaaataatagcttgaccattttcccccagcacatcctgaccagaaccgtttactaatttaacattgttcgggccttcagggctaagatgaaaagaaccatctctcgtatattgtacaggctgttgggaatcgtttacggcaacttgaaaataaacgtttggatttgatgcagctacatctaatagtttatctgtattctgaaaagcaccctgcgtcatattcaagctcgtttgatctaaataagcgcctgtgccttgccgaattccagctggcgtaagccgcttttctgttcccttatcttcttgattgttcacttgttgatacagcatatcattaaatgaagcatctctcgctttatatcctgtcgtatttgtattagatagattatggccaatgacatcaagctgctgctgcagctgtcccatcgtattagccgctgttatcattgtaaggttcatccttctcatctcccctgttgcttttagcgcacacgcccaatttcatttgccgctttatccatgcttctatcgtaagcttgcattattttttgatttgcctcaaaagctctgtaagccgttagtaaatcagtcatactttgagcagcatctacattggaacgttcaacaaatccttgctttaactgataagaaatgcctggattattcctagctgaaggcaagggctgattgttcagcgtttcatacaatccattccctgcctttttaatcgtttgtaagtcactagcataagcaatatcgatttgtgcaacctgctgattattttccgttacgttaccttgtgaatcaactgtaaagttttcactttttagttgaattggttgattatttgtatttaatacataagctccggtagacgtagttaaaaacccttgctgatctaatgtaaaattactgtttcttgtatattgaggcgtattatcagggctttgtaccacaaaaaatagtccgccctcttttgtaggcatattttgctccatcaatgcaatatcagttgattgagacgtttgctgaagatcaccttgtgtaaaatttggaactgtttcttgcatatacacgcccgtattaatcgtacctatttcttttttgttctgaacagagatgctacggtcagtaggtaaatcttcagattccattcgctgcagcaacatatcaggaaatgcctttaacgtaccttgatctgctttaaatcccagcgtattagcatttgctatgttattcgttaataagtcagtttgacgctgttgagacagcatacccgctgctgccgtgtaaaaccctttaaacatacttcatcctccttacaagtaaacgttgctcgttatagccagctcacagagtataatagataaaagaagagactcctctgtatgaaacgagccaatagaggagtcttcatttatttaaacaatattgcgacgagatagtttatcaatattatcgagcataatacctgttccaacagctacacagcccattgggttttctgcaattagcacaggcacctttaattcttccgctaacagctggtccataccgtgaagcaatgctccaccgccagttaaaataacgcctctgtctataatatcggcagaaagttcaggaggtgtacgctctaatacacttttcgaagcttgtacaatgacgctgacagactctctaagtgcctcctctacttcttcagaataaacagtaatcgtacgaggtaggcctgaaaccatgtctcgccctcgaatgtccagctcttcattacgagctttaggaaacaccgtaccaattttcactttaatttcttctgctgtacgctctccgattaagagcttatatttttgcttaatgtactgcaaaatttcggcatcaaaacgatcaccagccatcttaatagaagctgctgttacgatatcgcccattgaaaggacggccacatcggttgtacctccaccaatatctacgaccatatttccgctcggctgaaagatatccattccagcgccaattgccgcgacttttggttcttcttccaaataaatggtttttccaccgctcttttcagcagcttcgcgaatggctttttgttcaacagaggtaatatttgttggacaacaaattaaaatgcgaggcttggataaaaaaccttttacatttaatttgttaataaagtgtttgagcatagactctgtaatttcgaagtcagcgataacaccatcttttaagggacgaatggcaataatattactgggcgttcttcctaccatacgtctcgcttcttcccctactgctagcactctatttgtatttttatcaatcgccacaacagacggttcatttaacacaattcctttgcctttaacgtgaattaagacgttagctgtacctaaatcgataccaatgtcttttgctaacataccttaaatcctccttctatttacatatctttgcatgataaccattcttttttcctaatttactattttatcacaatttgtatatgtatgttgttattagcaaaaatatttattatatacctattttatccaaaaaataaaatgccctatactacctctataaaaaaggcaatattgggcattttttcattttacagtttcttcttcctttttgtactttaattttgttgcttctcccccacgcaaatgccgaatagatttatgataatcaagaatttcttttacttcatttgctaactcaggatttatttctggtagacgctctgttaaatctttatggacagtacttttcgaaacgccaaattctttcgcaattacacgaactgttttctttgtttctacaatatactttccaatcttgatagttctctctttgatgtaatcgtgcacactactcgccctccccaaattggatatgagaagtatccaagggaatgtatatattatcccttttctaacattctctttataggtttgtaacagtttattagcttgtgtgcagatatatgctagaaaagtcagtaaggacaagtgatttcttatatttttttgaaaatttagtgttttttatttacttttttgacataatgcatctcattttagaaaaattcataaaaaaagaagctcgattttatccagcttcttttcgtatttatggtcttgccttatgcatttggtttagacgtatctgttgaagggtgttttgaatctttatcttctttagtcttttcatcagatgatttttcgctatcctttgattcttcagaagaagagtcgtcttttggttctgtcacttcagctgctttgacttctttgatagaactaacagattttccaaaataactgcttggattaattgctacaccatctttacgaacttcaaaatgtacatgtgtttttgcttcttgattatataagctttttccagcttttgcgatggtttggccttgtttaacaatatctcctacttctacatcagctttctcaagagattgatactgtgtgactaaaccatctttgtgatcaatttctactacataacctagtaaaggatcttttgttgcttttgttactgtaccgctagctgctgctacaacatcaaatgatttatctcccttaacagctaagtcaacacctgtgtttggatgatacgtattgttgtagaaaactagtgcttcttcttgctgtttttcagatgcttgatcgtcgtagaaaggctttttcacgatagctgatgcttcactagcaactggcatctttaaattttcaagcgaagcatttacctctacagcgtcgtctcgataagccgtaccgtcttggctatagccgcttttgtcttctttgctaatatcgtttccattagcttgaaaccaaaggactgctgtaagaataattgctgcactcgctaaatagatagccgggaacacccaacgctttctaactaatttttgaactttcgattttggagaagtacgtttcttttcttcctctctcatatatcatcacctcagcaatcagtctgaacacaattgaatgaatatatacacagcgataaaaaatttttttcgattatttttcaacagatgaatctaaaatatacattttatttaaaaaaagtgaaaaacataaaaaaagacccttctataagggtctttgaattagcgtttagctgtcaattgtgcaacaaactgatcgttaggggtaatcgcaacacctgtataataatgagtaacaatatctttataggtttttccttctagtgccataccatttgctccgtactgactcatcccaataccatgtccatatccttttgtgttgatgataatctcattacctttttttgtccaatgaaagtcggctgaggataaacccagtttttctcgaacatcttttcccgacagttctttaccgtttatctttacgtaatctacgcgctgacccggcgttctagagacaatttcacctactgatccagtgtttgttaatttcactccaagcctctgttcaaagctagcaacagacattactttctgatttgtaaattcaggggactttttatcccacggactagctacactttttagataaggaatggaattcttccaatacgcttctgaattttcagtgtaaccattgctggtagaaaagaacgtagcattaattggcttatttttatacgtaagaatttgaccttgggtgtccttcactgcttcttgaatttttttgattttccaatcatagtctttgttccatctgcttcttagctcatctttatttaaatatacttggtactctacggtatcagtcacatccgctccttggggaagatgactatttccattcatcatagtttgcacaatataggttctggctgccaaactttgagccttaagtgcttcaagctcaaaagtagcaggcatttcagctgctactacccctacaagatagtcttcgagcggcagtttttctacttttttcgtttccgtacgataaacactgacgtcaagaggagacgctgtcactttttgtagtttttcggtttttggggtctgttcgacattttcatgtagctttccatctgtcttttcagtaaaaggaacaacgagaagtgttgggatgagtaacacaacgaaaaaaaagatgactcctagtacgacgattggctttgcttgtttcatgaacgcctagcctccatatctattattttgacaaggaacacctatatccctatatttcatatgtatggaggtggacaaccttttatgacagcaaaccggccataagggtcgtccaacgacaaaaaaagcatctcgctatgagatgctttttttatgacatatttacttgacgtctgaagcctgttgagtttgttctacttgctttgtttcatcatttacacgttcaatatcagcgcctaaagcggctaatttattgtggaaatttacataaccacgatcaaggtgttttaattccgttacacgcgtatagccgtctgctacaagtcctgctaatgttaacgctgctgctgcacgaagatctgttgctgctacttcagcgccttgtagttgagtaggtccgttaatgataacagagcgcccttcaattttaatatcagcgttcatgcggcgaaactcttctacgtgcataaagcggttttcaaaaactgtttctgtaatcatacttgtgccttctgctgctaacaataatgccatcatttgagattgcatatctgtagggaaccctggatgaggcattgttttaatatctactgattttagcttttcaggtcctacaacacgtaagccgtcgccttcttcagtaatttcaacacccatttcttccattttagcaacaagtgaactgatgtgctctgctactgcaccgcgtacaagtacgtttccacctgtaatagctgctgctaccatgaatgttccagcttcgatacgatctggaataattgcatgttctgcaccatataatttattaacaccttcaatacggatcgtaccagttcctgcaccgcgaactttagcacccattgcgtttaagaagtttgctaaatcgacaatctcaggttcttttgctacgttttccataattgtagtgccttccgctaatgctgctgccatcataatattttctgtggcgcctacacttgggaagtctaaataaattttagcaccttttagtcttccttcaacttttgcatcaataaaaccatttcctacttgaactttagcacccattgcttcaaagcctttaagatgctgatcaatcggtcttgatccaattgcacatccgccaggtaaagctacacgagcctcacctgtacgcgccaataaaggacccattacaagtactgaagcgcgcatttttcttacatattcaaaaggtgcatctgtttttaactctcttgatgcatctacaactacacgatttgtttcaaaatctacttctgcattcagatgtcttaaaacttcgccaatcgtaaatacatcggagagagctggtacatcatttagaattgtttttccttcactagctaataaggttgcagtgataataggtaaaacggcgttttttgctccttcaactttaactgtaccgcttaatctatttccaccgcggacgatgattttttccaaggtattcccctccgcgtccattttctctatattaatattcagacgtaatgataggtgtgccaacaactatggttgtttgaccgcccattcttgtcttgcgtaatgcaatttgtaagttcatttcctgctttttcgtttgaagagcttctttccacagtccagtatatgctgaaacagaggtaaatgactcttccactagagattccactggtttagcattgaaagctcgtaataggtcttgaatttcaacagacaaaacactttccatcttatcattgatttccccagttacacaagagaaaattatgggttctgataggaaaattttttcataatttgtctgaaatacattttgaaaatgggtcatatttttttctttcaaaccttgtcccgttacatgatacgatatgtacgcattgctgtgttcatcgatcgcataagttaacagaatgacttcgttcacatcttcacttttgcgtgtacctattgctttccataggtctctttccctcttcacttcccatttaaaacctctaaaattacttttaatacttttagcttgcgaataaaaggttttttggtcagtaacagcttttacttcttctcttgcatacaacgatacttcagttaacgaaacatgctgcttatttaaggtgtgaacaatcttctcaatagtagtttcattgttttgggcattgctcacataacttccatgatatacgaataagccagtaatgaaaatagccaaaaagacactaatttttttaaacatttcgccactccctctccgtactcatcagtctttccagaaggcgatgatacatacatgaaaagggtcgtcatatttagacatagcgacatacattagcgtataaattcgtatatcttcaatgaatgaacgcctattttatcatagactcatagcttgccaatcattgaaaaaatgagggaatgcgctgtgaccaaaataaataatccaaaaagaaattacttactgttgatgaaatcgtaatggtcaataaaataagcattaattttgcttgaaacacatgattaggtttcatcagcttttcaatttgaaagccttgcaaagcataccaagtaatcacaataaaaatcaaatgtgaaatcatggttagtaacgtttgctgttcaattcctccaaacaataaaagcactccttttaaacaccatatgaaaagaagagacgatcatcgtctcttcttttcatattaaagcacaattatgcaaattcgtaaacggtaacatgaaaaacatttattttattccctattttaagatccttttccactattgagcaaaataaagaagatagatgcgcttagttaaatggaatatataatcatagatcaatgctatttgctcttccctttttgtataatagagcaaaaaagccctctcattcgtttgagagggctttttttagaacttacgttgactaatatctaaacgattgactgcccgttttaaggcaatttcagcacgcttaacatcaacgtcatcttgtttgctatcaaggcgcatttcagcgcgctttttcgcttcttctgcacgagctatgtcaatctcttcagctgtttcagcagcctgtgcaagaattgttactttgtcaggtcttacttcaagaaatcctccgctaacagccacaagttctgtactgcttgctttcttcaagcggacggctccaatttgtaaaggagcaaccatcggaatatggccatgtaaaataccaagctcaccactctgtgctcgggtacttaccatttccacttctgattcgtaaactgggccatcaggagtcactacactgacatggattgtcttcatttaaaaaacctcctatgtcccttaaattaaacttctactcccatacgtttcgcattttcaataacttcttcaatgcgaccaactaaacggaacgcatcttcaggtaaatgatcgtatttaccttccaagatctctttaaatcctttaacagtttcttttacaggaacataagaacctttttgacctgtaaattgttctgctacgtggaagttttgagataagaagaattgaacgcgacgagcacgttgtacaacaagtttatcttcatcagataactcatccatacctaggattgcaatgatatcttgtaactctttataacgctgtaacgtttgttgaacttgacgcgcaattgcatagtgctcttctccaacaatttcaggagataaagcgcgagatgtagatgctaatggatctaccgcagggtaaatacccatctctgataatttacgctctaagtttgttgttgcatctaagtgagcaaatgttgtcgctggagctggatccgtatagtcatcggctggtacgtaaatcgcttgaatcgatgttacagaacctacgcttgttgacgtaatacgctcttgaagctgacccatttctgtcgctaacgttggctgataacctactgctgatggcatacggccaagtaatgctgatacttccgaacccgcttgtgtgaaacggaagatattatcaataaagaataatacgtcttgaccttgttcgtcacggaagtattctgccattgttaatcctgttaatgcaacacgttgacgtgcaccaggtggctcattcatttgtccaaataccatagccgtcttcttaataacaccagaatctgtcatttcatggtataagtcattaccttcacgcgtacgctcacctacaccagcgaatactgaaataccgccgtgctcttgagcaatgttattgattaattcttgaatcaatactgttttacctacaccggcaccaccgaatagaccgatttttccacctttaatgtaaggagctaataagtctactactttaatacccgtttcaagaatttcagcttgtgtagatagattttcgaactttggtgcttgacggtgaattggatcacgacgtgcacctgcatcgattggggcgtctaagtcgattttttcacctaatacgttaaatacacgacctaacgtaacgtcaccaactggtactgagattgctgcacctgtatcttctacttctaatccacgaactaagccgtcagtggatgacattgctactgtacgaactgtgttatcacctaagtgaatcgcaacttctaatgttaattcgattgcaacttcacttgcactgctcggtttatgtgaaattttaagggcgttataaattgccggaaggtgtccgttgtcaaactttacgtctacaactggacccatgatttgagtaacgcgtccttttgtcatcgtgttccctcctaacttgcttttccattaaactttctattctaacgctgccgctccgccaacaatttccgtaatttcctgggtaattgccgcttgacgtgcacggttatatgacaatgtaagattattgataagatcttttgcgttgtctgttgcacttttcatcgctgtcatacgagcagcatgctcacttgcttttccgtcaagtaggccgccgtaaattaaactctctgcatactgaggaagtaatacttctaaaatctcttcttgtgatggttcaaattcataaccaacaagtttaccagaaggttgaagatctgttagaggcaatagcttcttctccgtcacttcttgtgaaatcgtattgataaagtgattgtagtataagtaaagttcatcaaacgtaccgtctgcaaacatttgaactgtttgtgaagcgattccttgaatgtcagcaaaagctggctgatctgctaagcctgtgatttcaagcaaaaccggaatgccgcgtttcacgaagaaatctctccctactcgtccaattgcaatcacaccgtattcatcaggtgattgatggcgttcttcaatagcttgagatacttttcgcaaaatattactgttatatgctcctgctaggccgcgatctgaagtgattacgatgtaaccagtcttcttcacactgcgcgcagttagcattggatgtgaagcgcctctgctgcctagggctacgcttgagactacttcttgaattttttccatgtatggaacaaacgattttgcattttgttccgctctattcagctttgcagctgaaaccatttccattgctttcgtaatctggctcgtttttttcgtcgatgtgattcgagtttgtatatcacgtaatgatgccaaaggtttcaccaccttgttttagaagatcacgtggtatgaaaggtgaacaaatgttcaccttcaccttattgaaagattgtcttaacataccatgctgacaatatattattcagatgcaataaatgttttcttgaattcttcaagtgctgattcgaatacgccagcttcaggaagtccaccagttgtacggattgattcaagtacttctttacggtttgattctaaccatgttaagtactcgtcttcaaagcgcgtaatatctgataccggaacatcatctaagaagccttttgttaatgcgtaaagcacagctacttgtttttctacgcgaagcggtttgtgtaaaccttgttttaagatttcaactgtacgcgctcctcgatttaattttgcttgagttgcttggtcaagatcagaaccgaactgagcaaacgattcaagctcacgataagatgcaaggtctagacgcagtgtacctgctacctttttcatcgctttaatttgtgcagatccccctacacgtgatacagaaagaccagcattaatcgcaggacgcacgcctgagaagaatagatctgactgtaagaaaatttgtccgtctgtaatcgaaattacgttcgttgggatataagcagatacgtctcctgcttgcgtttcaataaatggaagagctgttaatgaacctccaccttttgcgtccgataactttgccgcacgctctaataaacgagagtgcaggtagaatacatcccctggatacgcttcacgacctggaggacggcgtaatagtaatgaaagttcacgataagctgatgcttgttttgttaagtcatcgtaaataacaagtacgtgcttaccgttatacataaactcttcacccattgttaccccagcatatggcgctaagaataatagtggggctggttgtgaagctgatgctgttacaacgattgtgtaatctagagcaccgtgtttacgtaatgtctctactacgttacgaactgttgattctttttggccaatcgctacatagatacataccatatcttgatctttttggtttaagattgtatcgattgctaccgatgttttacccgtttgacggtcaccgataattaactcacgctgtccacgaccgatcggcacaagtgcgtcaatcgccttgatacctgtttgaagcggctcatgtactgatttacgatccataacgccaggtgcagcaccttcaattggacgtgtttttgttgtttctactgggcctaagccgtctactggctgacctaatgagttaacaacacgaccgattaactgctcccctactggaacttccatgatgcgtcctgtacggcgaacttcgtcaccttcacgaatttccgtatatggtcctaaaataatgatacctacattgttttcttctaagttttgtgccattcccatgacaccatttgaaaattcaaccagttctccagccatgacattgtcgaggccatgagcacgtgcgataccgtccccaacttggataacagtacctacatcactcactttaatctcagactgatagttttcaatttgctgcttgatcagcgcactaatttcttcagctttgatgctcatgaatttcacccctatctacgatctgtgtgcaagaagtcctcggtggatcgtttctaatttgctgctaatgctgccatcatagatacgattaccaatgcgaagcttcacgccgccgattaggcttttatctactatatttgaaatatttaacgtatgttttccaactttagaagcaaatgattgtgagattgctcttttctcatctgcacttaaaggtttgacagaataaacagttgcatctgccacgccacgtacttcgttcgctaggaaacgatactcttttaccatttcgctaacaatttgaatgcggtgacgctctaataatagaagaaccgtatgttgaacagttggtgaaagttcagcaaatgcctcacttacaaactgtttttttcgctcaattgtaatttttggatgagttaatacatccattaattcaggtgttttagcaaacacctcttcaacgatttgtagctggtcttgcatttcatcgatcatctgtttttctgttgctaattgaaaaagagctagtgcatagcgtttggctacagctggttgactcatcgtacatcccctacttcttggatatattcatgaattaacttctcttgatcttgttcagaaagttctttttcaataactttcgacgcaattaaaacagataatgaagcaacttgctcacgtaacgcagcaactgcttgatctttttgctgttcgatttcttgttttgctgcagcttttagacgctcagactcttcgcgtgctgccgcaatgatttcttcttttttatcttctgcagactttctagcgttttccatcattacttgcacttcttgacgagattgctttaagatttcacgctgctcttcaacaagcttcttcgcttcctcattttgcttttctgcttcatcaatctcaccggcaatatgctcttcacgttttttcatgattcccattacaggaccaaacgcgaatttttgaagtaacgcaagtaggataaggaacatcactaattggaaaagaatatctccaccattaatgcctgctgctcctaacacaaacatgttcgacacggccatgttcactcccttcagagactccacatatataatttacttattaaagacataaagtaatggcgaaggttcttttgaatgatcttcgccacatgtaacacattattatttaccttgtaccatgaatgcaataactacggcgataattggaagcgcctcaactaaggcaaccccaacgaacatcattgaagttaatgtaccacgtgcttctggttggcgagctgtgccttcaatcgtcttagaaacgataagaccgttaccaataccagcacctagtgccgctaaaccaatcgcaattgcagatgctattaaacccattttataaagtcctcccttaatatatatgattttgtttaactaagttttgttttgtccaaattgggtattacttgaacaaagctttataaattaatggtcgctactcactttgtgagataaataaaccatcgttaacattgtgaaaatgaaggcctgaattgcgcctacaaaaatactgaatccttgccataaaagcattggaatagcagctccaattgtacctaggaagcctgttgttgctaaaccagctagcaagcttaacaaaatttccccagcataaatattaccgtaaagacgaaggccaagcgttaacgtattggcaaactcctcgataatcttaagcgggaataaaaacgccattggcttgaagtaatctttcgtgtatgcagaaaaacctcgcattttaataccataataatgtgatagtacaactaccataacggctaacgtcagcgtaattgctggatcagcggttggcgatttccaccataagttatggtcaatcacgatggcaaatggaagacccaacatatttgacacaaaaatgtacataagtaaagttacacctagcgtcaaaaagcggccacctgttttccaatccatattgctattaacgagtcctttaacaaaatctaagacccattcaataaagttttgtgcaccgcttggcttcatagcaagagtacgagtacataaaactgcaattaagaatacaataacagaagctacggtaaccataagcaagttactttgactaaaagtaaggcctagaaactctatagttggtgattcatgacccaactgtgttcacctctctttctatcttctacgcatattttgaacaactaaatctatgataatgacaacgtaatacgtcattaatcccacaactacactaataatatgaaaggtttttggataagagatggtaatcacaactgcgagagcagctgttgcaaatcttacaacagtcccaattgaacggggctttttcccctcatccaacgcctgtccaaactgctcaaactttcttactaagttccacaaattatacaaactcagggcggttcctaaaattaaacctgcaaaaacagccttataacttgtaaatccccagccgagaacgtataatgctaacaaatacaatatgtatgaacgaagtcttggaaaaacgtgctgcaaatcctgcatgaattattaatctcctgaaaaaaaatggtggactgtccgcagcatcataaaaacacctgctgctagccctgaaagaaggcctaaaatcaaaaatagtggttcggtgtcaagccattgatcagcccatcttccagagaataagccaattaagactgaacctgctaactgtgatagaatgattgacactaatgccatcgcttgcaaaggatgacggttgcgatctttcataagctcataccccttttgcaaaattttcttttttccgaattctctatcgtttttatagctcaatatatgatagaaaggcaaaaaaaattgctaaaaaaggtaaaaacagctaataaaatacgcagaaatatcaacggttttcacaggttgaaaaccttatcatttatattccctgtaagcatacaatagcgtatatttaatgtcaatgtgtttaagctaaaaacttcacaatctcttcttattgttcacatttctgccacacataaaacctcttcaaatgaaaacatttaaagaggttcattcaatcgttattgtactgtgtacaacctgctcttgtctatgctttttcacaaatgcaaatatttggtacgcccccggcacaagcgattcatcgatcgttattttctgttttctcatgcctctttctacatcaacgtcaacatctaaatatgatataaactgtaaagactgcttatcaaaaagagcaacgcctaactcatctgctccttcaggcaaaaacagttcatagctataagtatttttctctttttccgctgctacttgcaatcccatgatacgaggataatctggaatgctaaccatgtacatataaggaagcgaaaatgtttcacgtgaatcatttatttccaaatatccgtcatatatacctttatttttaaaacggggctgcaccgataaagtgacagctatttcttttgtctgatggggctgcaccgtgacgggtaatggaacatcccagttcactccttcatcccttctcggaacgtttaagcgatacgtttttgctttatcagactggttatcaattttaaatgataagactttctttgatgggcgcgtaaaaataccgaaagataaagaagatggataaaataaagagtctgctgtgacagcttttgctatttgaattctcccagctccttgttcatatacgcgatacgtttgaccatttagctgctgcattactttacttgtgttcatcaatgaagctttgacttgttcaggagaccagttcgggtgagcttgtaaaataagagcgcacgctccagctacatggggcgcagccatacttgttccatgcatgcgttcgtatcccccaggaactgtactattaatgaagtaaccaggtgcgacgacgtccggcttgattccccaagtagtcgttacaggtcctcttgaactgaaagatgtgagcaagtcttgcaccacttgcttgccagtacgtaagtatggctgttgagactgaatgtattgactaatggtatcaccgttttttttacttatccatatcactggaatatttactgactcctgtagtttaccgattatgcttttttcagtcggactatataaaataacggctcttgctcctgcctgttcagcttgtttaatctttttttcaaccacatttccttctgcttttagcaaaatgacgttacccaacgcatgcttttgctctttgaagtattcttcatttattacacgcagcgtttgattaaacgtccatggacgagacccttctactggcgccatcataattttttctttgctaaatccaattgttagaaattgaactgttgtcggggaaacagaagcgccaaccgaaatagcttttcccgctgtacctggagagcccacagtccataaacctggacctgaattgccgctggatgtaaccgttacaattcctttttcaacagctcgatctaacgctaagcttgttggtaaatcagggccattcacatcatttcctaatgataaattaataatatctacatcatcttgaattgctttttcgatagctagaataacactttcagacgttccagctccaccaggtccaagagctcggtatgcgtagatctccgcttgaggtgctacacctttaatatttccatttgctgcaataataccagctacatgagtgccatgcagagtaggctctccttgctcccgagtggtttccatcggctcataatctttatctattacatcataccctcccctgtaggtttgttttaaatcgggatgagaataatcaacacccgtatcgatgacgcctactttgatcccttttcctgttaagcgccgattataagtatcaaataagccccttacctgttctgagccaatgaaggttacgctattttcttctgcaacctggtagtttttaatagaatgtgaaccaataatagaaggattatgagatagtttttccaaatccgagatggagccgtttaatgaaagtcctgtaaataccgtgtgaaattcgctcttaatctttatattagaataatttttttgtagctgatttttaaattccgcgaatttttctttttcaaccatgacaattattgatttttcctgatgattcatttcttgttttatagaaggaaatatcggattgaacgacatttgccctcccccgctccctaatataaagctaatcattaaccatttaatccacataaaaaaacacctctcacactatcgtgtctcaaagagacacttttcatgtgaaaggtgtttagaaatcttacgaaagcggattaaaagcttccggtctattttcacggcggttgaaatagtagctaatagcatcacaaatacgtttagaagctaagccatctccataaggattcgatgcttgtgacatttgcttatatacgtcttcatctattaacagctcttttgctagcgtataaattgtttcttcttccgttcctgctagtttgagcgttcctgcttcaattccttccggtcgctctgttgtatcacgaagtaccaatacaggtacgcctaatgaaggagcttcttcttgaacaccgcccgaatctgtcaaaataatatgagcgcgctcagcgaagttatggaagtcaattacatctaacggttcaattaaatgaatgcgtggatcatttcctaagatatcgtttgctgtttctctaactaccggattcaaatgaacaggatacacaacttgcacatcttcatgttcatccacaatacgtttaacagcacggaacatgtttttcattggttcgcctaaattttcgcgtcgatgcgccgttaataaaataagacgatcatctcccaatttcgttaacacttcatgctcatatgtctcttttactgtcgtttttaacgcatcgatagctgtgtttccagtcacaaagattcgctcttcttttttattctctgcttgcaaattagctgcagacttatctgtcggagcaaagtgcaaatcagcgagaacgcctgtaagctgacggttcatttcttccggatatggagaatatttattccatgtgcgcaaacctgcttcaacatgtcccacctgaatttgattataaaaagctgctagtccggcaataaacgtcgtagttgtatcgccgtgtacaagtacgatatccggctttacttttttcattacgtcgtccaaaccttctaatcctctggtcgttacgtccataagagtttggcgatctttcataatgttaaggtcatagtcaggctgaatgtcaaaaatgctcaatacttggtctaacatttcacggtgctgagccgttaccgtaacaatcgcttcgaactcctccggtcgctttttaagctctagcactagaggggccattttaattgcttctggtcttgtcccgaatatcgtcattactttaattggctgcttcatgttcatcacccgaatctacaaattattttgtaccgaataaacgatcccctgcatcacctaaacctggaacaatatatccatggtcatttaatttttcatctaatgccgcaatgtaaatatctacgtcagggtgtgcttcttttacgatttccacgccttcaggagcagcaattaaacacataaatttaatgtttttagcgcctctttttttaagagagttgattgcttctacagctgaccctcctgttgcaagcataggatctactacaataaagtcacgctcttctacatcattaggcagctttacataatattcaacaggctgtaatgtttctggatcacgatataagccaacgtgtccaactttagcagctggcattagttttaaaaatccatctaccatgccgataccagcacgaagaattggaacgataccaagctttttccctgcaataacttttgactttgttttgcaaaccggtgtttcaatttcaacgtcttctagcggtaaatcacgtgtcgcttcaaaagccattaagcttgccacttcatcaactaattcacgaaactctttcgttcccgtttttacatcacgtatgtaagttaatttgtgttgaataagcgggtgatcaaatacgtatactttgcccattgatatctctccttatatataaagatgtacacattaaaataccattcaacgaattgaatggtacgtactagtaaaaacatatctcttgctaattaaatttatacattgcattcattttacagaaaaaagtttttgagttcaagcattattcaaaaaatgattgaattgctaccactttctccataaaaaaacaggcacaaaggcctgtctctcttacaatgatttatacatttcaaacttgcttgttaaagcttcaacgcgtgttttagcttcagctagcttttcttcatcttcaatatttttaagcgttaatccgatgatagaagcaatttcatccatctcttctaagccaaatccgcgagttgtaaccgcagctgtaccaatacggataccgcttgttacaaatgggctttgctcatcataaggaattgtatttttgtttgttgtaatacctacatcatcaagcgctttttcagccactttgcctgtcaaattcattgagcttacgtcgattaacacaaggtgattgtctgttccttcagatacaagagcaaatccttctttctttaatccttctgctaaacgattagcattatcgatgatattttgagcatagtgcttaaattcatcttgtaatgcttcaccaaatgctactgcttttgcagcgataacgtgcatcaatggaccaccttgaataccagggaagattgacttatcaatctttttcgcaaattcttctttacataaaatcataccgccgcgtggtccgcgcagtgttttatgtgttgtagttgtaacgaaatgagcatgtggcacaggattttgatgaagtcctgcagctactagaccagcgatgtgagccatgtctaccattaaataagctcctacttcatcagcgatttcacggaaacgcttgaagtcgattgcgcgcggatatgcgcttgcaccagccacaattaattttggtttatgtgtacgagctttttctaatacatcatcgtagttaatgcgatgtgtttcacgatctacgccatattcaatgaaattatactgaacaccactaaagttaacaggacttccgtgcgttaagtgaccgccgtgcgataaattcataccaagtactgtgtctccagcctctaaaactgtgaaatatacagccatgtttgcttgtgcacctgagtgaggttgaacattcacgtgctctgctccgaaaatttcttttgcacgatcacgagctaagtcttctactacgtctacgtgttcacaaccaccgtagtaacgtttagctggatagccttcagcatatttatttgttaaaactgaaccttgtgcttccattaccgctgttgttacaaagttttctgaagcaattagctcaatcttagtacgttgtctttgtaattcatccttgatcgcattataaactgctggatcttgttgcattagttgtttctccatcaaaatcctctcctcatttcgtattcgcaatgttcgttatttgttgattcaactacattgtaacatgatttatttagaataaaaaagaaaaaatgtgtattattttaatatatttaattacgaaagttcgtaaaacgctctcattccaccaattagttttggacgcgtctttgctaaagtaacatgagcgtgtccaactgcgtttaacgtacaacgaacgggtactgcgacatgctttaaatgcataccaatgaatgtatctccaatatcaataccggcatcagctttaataaactctaccaaaacaggatctttaagctggccataggcctgtgtagccatcgctccgcctgctttatgaataggcacaacactaaccatttctaaacgctctttgcgagctaattctctttctactaccagtgctcgattgagatgttcacagcattgaaatgctaagtgaacacccgtcttttttcgaaaatctgatagtgtatcaaaaatcatttctgcgacttccattgcgcctgcggttcctattttttcaccaattacctcgcttgtactgcatccaatgacaagtgtatgttctgaagacaactgcacttgtgctaaaaaatcagatagaactgtttccaactgctctttccatttcgtaagttcagacacgtttttcttcctttctttcattgaatacgttcacattatacagttaatgttgcatcactttgctgctcatactgtttaattttattcacgcgattttcatgtcggccgccttcaaattctgtcattaaccaaattttcgcaatttcacgtgcaagtcccggcccaatgacacgttcacccattgccaaaatgttgctatcattatgttctcttgtcgcttttgcactaaacgtatcatgcactagagcacagcgaattccttttactttattagctgctatactcataccgatgcctgttccacaaataagaatgcctcgatttacttcttggctcgccactttttgagcaacgggcagtgcataatccggatagtctacggacgctgtgcattcacaccctaaatccacatattcaatatttaattcttccattaaagagataatttcctgtcgcaaatttataccgccgtggtcagatgcaatagctactttcatctttgtttcctcctcatacgtaccttcgtcttatattaaatttctgttcattttaagtcagcaaaaatttatgggaccttttataatttgtcgactattttgttaatcatacgctctaactcttctaaagtctgttcgtacgtctgtaatgatccgccaaacggatcagatacttcaccttgctcgtcggcaaattcttttagcgtaaataatttatcacttacgtatggagcttggttcaaaatcagcattttatgctgctccgtcatcgtaaaaatataagtagcccacatcaattgttcttccgttaatgctgccgaagcatgagaacaagctatgcctttctggtgaagggcaacttgtgcatgaacagaagcttcacttccatttgaagcgaatacgcctgcagacttcacgtttattccatctatctctttagctttgagcaacgcttctgccatagggctgcggcacgtgtttcctgtacatacaaataagatgtttttcaagatacatcctcccttgctttcactatgttcgactatgttgatattccaccctattgtatctctattgcctgcataaatccagttagctttttcaggtatttttttatcgattatcgcttcatgcatctcgaaaaaacgacttcgctttccttcttttatcactacaatccaaaagaagcaaaaaaagaccataacctgcatggtcatgatcctttacctatttatatatagttaaaaaggtaataacaatttgattccaaaagctaataaaatgctcccgcccagtgcctcactatatgaaccaatccaaccttgtactcttctgcctagcagcaatcctaaccaagttaatagcatactcactacgccaaaaacaataatggtcaaaaacgttcttgccccaaaaatacctaagctaagtccaacagaaaaactatctagactcacgctgagcgcaaaaaataacagtccaaagccaactggtttgataaacggcgtatcgtcatgcttaaaggatgaataaatcatctgcgccccaagaatcaacaataaaattccaccgccataggtagcaaacattccaagtttatcagacaaaagtcgtccaataaacatgcctaacagcggcatccaaatatgaaatacaccgataacaacaccaatgtagaaaatttggcgaaagcgtaaacgaattaatcccattcccaaaccaactgagaaagcatccattcctaaggcaaacgccataatgactaatgtgatcatttcactaattaactgagatgcattcatctttaccctcctcggacgtgctcctatttcaaaatatgcacattcgaaaaggtttagaagatgaattttattgcttaatcacgtgatgtcctgcagctttcattaatcggttcataacggcatgaccgactccttcttcagaaaaactttcactaacgataacatctacgtcacactcattaaatgaacgaagcgactcgtataagtggctagcaaccgtctctaaatttgaacgagatccacatgtgataaccgcatccgctttatacgcatcttcatgttcagatgtcgttaatacccccactcgcttaccctgatctttatagcgatcgataatagattggaaaaaatctgaactgccgtcaacaatgacaagcggtgcatcaggtgcgtaatgcgtgtatttcatacctggagattttggcgcttctttatcacttagtaacgctcgatctacttttacgggaccaatgacattttccaactctttctgagtaatgccgcccggacgtaaaataataggaatctcttcagtacaatcaaggacagtcgactctactcctacccctgttgctcctccatctacaactccgctaatacgcccttctaaatcattcatcacatgatgagctagagtgggacttggcttaccggaaaggtttgcactaggagctgcgataggcaaagccactttttttaataatgcgagggctaccggatgtgatggcattctcactgcaatgctgtttaaaccagccgtaaccttatctgaaactcgatcttttttgggcaatattactgtaagaggacccggccaaaaagcatcaatcactttctctgcttttgaaggaatcgactctacaaatgtatgaagctgctctttatctccaatatgaacaataagagggttatcactaggacgtcctttcgctgcaaaaattttatccacagctttatccgatgttgcatctcctcctagtccatacaccgtctctgtaggaaaagcaaccacttcgtgattgcgcagcaaatctgctgcttcttctatctgtggataaatatctttttcgttcgtaaaattatccacaacccataacttagtttccatcttcttcaactcctttttctttctatatctaggttttttttactttaaaagtacaatatgtatcaaagatagtaaaatacctgcattcattatatcaacaaacaagctttatccacaaaatgtggataaagcttatgtttttgtgaataacattgtggatacccaatcaaaatgatttatccacattttcttttaactagctgcataaaacatcacatagacatcccgagggtttggtaacttttttaaataagaatgttcttttaacaactcaggcagtgcactgtaagatgtttgctgaaaattcatcatttgaaaaaaatgtagagaagatgccttatttgttagtaaatatagttgcttcacgccatgcttttgagccagctggacgatgcttttaaatagcagcagaatatcagattgcattaaagaaggagacacgacaagggagcggagaattccatccacaccttctttttcaaacccaactgttgctagcagctcgccttcttcattttccattatgacaaattgatgaatatgctcttccacgccagctgtgctgatgcccgctttttgtaagaactgctcaattcgaatataatcattttcactagcaatttttaattgttctctcattttaatcacctcaacttgttttctagtaacaaatctatgagatgattaaaaaaagtagaactgaattttatttttaatgattctattaattaaatactgacgatacccattctactacaaaaaacttaacttctacggaatcttcttttgatttagaatcagcttttttcttagatgaaacagatttttcagcttctttactttcctttttttcagccttagcacttgtttcttcctttactgtgctgcttgtatcttttgcaattacttctgtagaagatactgttggttgagaaggttcctcagctttctgctcaatagaatccgatgtaatagttgcagattgaatttctgttttcactgcgggttctttactttcagccgatttgtcatctgttttgtctgcagattttgattcagaagctgctggtttctctttttcttcctttggctcttcttcagatggctccggcgcttttaccgcttcaccgtttgagaaatctaagaagcataaaggaggaaatagtacgcaccaccagtttgctccctctcctttgccaagagtaataagcacggcttcatactcacctgctggatataagaactgaccgtacaacttagtaggaaactctacttttccgaatttaacatgaacagattcatttacgccttcttcttttagcacttctttcgcaattgtttcaagcgccggcaaattttctttaattgtttttcgagctacagttacagatgttaaattttttacccattctgtgatttgttcgttcacgcggtcacgaatcagacgttttacgtactggtctttttcaccgtcgctgtttgctaaaatgcgcagtcgaattgcctcgtctggaatgactgcaggctgatctgcctgcacttggttatgtgtatatataagttgagcatttgctccaataattaataaaataaaataaatgatagcatatttcttcatttcggccaccgccctttcataggaacagtatggccgaaagcaagatatcttaaactagtaatttagtaaaaaaatgcatgattttcaaaaatcaaagggaaaatcattccctctgatttttttagttctcgcgaagttgtgcaaaaaccattcgatcttttccattaatatcatatacacattctacaaaagctgtcggaaacgttttttgcagcatctcagctacatcttttgtctgtccgaccccgacttcaaatccaataatactatttgacttcgtcacatatggcaactcttccatgaaacgtcgataaaaatccaggccatcttttccaccaaaaagagctcggtttggctcatgatcttttaccactgtggacaactcatcatctgctggaatataaggcggattagacacaattacatcaaatttctgattcgataataaaaatggttgtaatagatctccctgtataaatatgacagcagcgtccaggttttgagcattttctttagctacgcttaaagattctatagctatatctgttgctgtaacttccactctgtcaagctccaaagctaaagtgatagcaattgccccacttcccgttccaatatctaaaagctcaataggctggtgttgaaattctttttttattcgagaaatcattccgtataccagctcttccgtttcgggccttggaattaatacatgttcgtttacaataaatgaacgcccgtaaaattcttctgtcccaattagatattgtacaggcatacctgctttatgagcatggacatcttgttcaaatctttttagaatttcttcttctagttcttcctgcagagcacctagcaaatgagttctcgtcatctgcaagtgatggcgaagcaagagttctcccgcgttttcatctcgctttgcctctttcaaaaaagaagaagcccacttaagggcttcaaatactttcattagttcgaatcttccattcggcgcgcttggtcttccatgactaatgcatcgataatttcatcaagcttgccttctaagatttgatctagcttttgaatcgtcagaccaatacggtggtccgttacgcgattttgcgggaagttatacgtacggatacgctcggagcgatctccagatccaactgcttgtttgcgcgttgcatcgtactctgcttgtgcttctcgctggaacttatcgtacacgcgagcacgcaatactttcattgctttttctttatttttaatttgagacttttcatcttgacatgataccactgtatttgttggtaaatgcgttaaacgaacggctgacatcgtcgtattaacactttggccaccaggtccacttgaagcaaatgtatctacacggatgtctttttcatgaatgtccacttcgacttcttccgcttcaggaagacatgctaccgtcgctgtagatgtatgaatacgaccgcctgattctgtttcaggaactcgttgaacacggtgtgcaccgttttcaaatttcatctttgagtacgcacctttaccgttaatcataaagataatttctttataaccgcctactccagtagtcgttgcttccattacttctgttttccagccttgggattcagcaaagcgcgaatacatgcggtacaaattagctgcgaataatgctgcttcatctccaccagccgctccacgaacctccatgattacgtttttatcatcgtttggatcttttggaattaataaaatacgtagcttttcaactagctcttcttgctgcgtttctaactcggcaatttcttcttttaccatgtcacgcatatccgcatcaagcttatcttcaagcatcgttttcgcttctgataactgctcttttacatctttgtattcctgataagccgctaccgtttgttgtatatctgattgttccttcgaatattctctcaacttagaggggttgtttacgatctcagggtcactcagaagttcgtttaacttctcatagcgcgcctctaccgcttctaaacgatcaaacacgtcattcacctcattctttatccataacattgtaattatagtatagctttaaaatagagtcaaaaccttgttaatacacgtatatgaacaaaaaaacagaactgcgcgttctgtttttatcatcataaaattcttgctttatctttcgaccatttcacttgagtccacagacaccgcttgtcctttagacttttgcacaacgtggcaatgacgacatcttggttcgtacgattcagacgcaccgactaaaataatagggtcgtcataagaagcaggctcaccgttaatcaaacgctgcgtacggctcgcaggagagccacatgaagcgcacacagcctgtagctttgttaccgactctgcaatagccattaactgcggcatttgtccaaaaggttcacctttgaagtcttgatctaaccccgctacaatcacacgaaagccttgatccgctaaagattgaacaatttctaaaatatctgtgtcaaaaaactgtacttcatctatcgctactacgtctgtctcttcatctactcgctttaaaatatcgcgcgatgccgagattgaataagccataacagatgtaccattatgtgaaacaaccgcttcttcgctatatcgattatcgattgcaggcttgaacacttgtgctttttgtttagcaaactgcgtgcggcgcacacgtcgaattaactcttctgatttccctgaaaacatactgccacaaattacttctatccaaccgctttgtttcattacgtacaccactgcgggactctcccttcttctcgttccgtttctgagcgaaccgctactaacttaatctacgtcttctatgtagatcttattcctatgataaagtacccacttttttatcaagcagacactgtttttctacttttataagcaaaaaaacaggcaagaagttaagctacttgcctgtttgtttcgacaatgtgattatttaagaccgtattttttgttgaagcgatcaacacggccaccagcttcagcgaatttttgacgaccagtgtagaatgggtgacattcagaacaagtctcaacgcggatctcttcttttacagaaccactttcaaattcgtttccgcaagtacatttaaccataactgttttatagtttggatgaattcctgttttcattcgtttcatctccttccgccctgaatcattctgaaacagagtttattgataaagatagtgatgaaataataactatttcactgtgtactttatcaacacacatgatgaaattataacaagggttgtatgcttttgcaaccacatgttttataacttatcgtttatttgctagaagcgtttttttctcttccgttaacatcgagaagaattcttcatttgtctttgtttgacgtaaacgttttaagaatttttctgcaaaatcaggagcatctgccattgatttacgaattgcccataagtggtctaaatgctcttttggaattagcagctcttctttacgtgtgcctgagcgacgaatgtcaatcgcagggaagatacgtttttcagctagtgaacgatctagatgcagttccatgttacctgtacctttaaattcttcataaataacatcatccatacgagagcctgtatcaattaaggctgttgctagaatggttaagctgcctccatcttcaatgttacgagcagctccaaagaatcgttttggacggtgaaaagcagccgggtcaataccccctgatagtgtacgaccgctcggtggaataactaagttataagcacgagcaagtcttgtgatgctatccatcaaaatgacaacatcttttttgtgttcgactaatctcatcgcacgttcaagtacaagttccgctactttaatgtggttttctggcacttcgtcaaatgtagaactgacaacatcaccgtcaaccgaacgctcaatgtccgtcacttcctcaggacgttcatcaataagaagaacaatcaattctgcatcaggatgattcgttgtaatgctattggcaatttcttttaacagcatcgttttacctgcttttggcggcgcgacaattagtcccctttgcccaaatccaattggtgaaatcaagtcaataatacgcgtagagaaacttcttggctgagtttctagcagcatttgttcatttggataaataggcgttagcgctggaaaatgcacgcgatcttttgacgtttccggatcttctccgtttaccgcttctacatgtaataatccgtagtaacgctcattttcttttggaggacgaactttccccgataccttgtctccattacgcagatcgaagcgacgaatttgtgaagctgagatataaatatcttctgaactcggtgaatagttaattggtcgtaggaaaccgaatccttctgactgaataatttcaagaacgccttccataaataaaagcccatcttgttcagcttgagcctttaaaatagcaaagacaagttcttttttcgttaatttactatagtacgaaactttatactcacgagcatgttcatacagctcttttaatttcatattttctaaactggataatgttaagttcattaggacaccacgctttataatgaataatttttaaccgttcctcccatattaaattcaaatataaaattgagagatgatatggatggaataaatctgtgaaaatggagaatataacctttgaagtataataagtagaatcaattgattaactatacacttttagaagaataattccgacataaaaccatttatattatcttgataaatttaacgtagcaatttatattctaacctttttctatctttttaatcaatctttttttactttagaagatgaataaaaaaaaggaaatttaatagcttacgagaagcgaggaaaaccttttcataatttcacattaaaggaaataaactggacgttaaaataagaagtgaaatttaccttttagcttccctttttatctatttaccctattcataaatatataagctacacagagatagaagaacgctcctacgcctgtgtagcttattaaaaagctcatttctaaactttgctttcatgactgtggcaccgatttgcctttatgaattttgaaattgctcaatttcctcttgagtcatctcttcacgccaaatcattgcccctaaatccgatagcttgtctactaaatggctgtaacctcggtcaatgtgctctaaacccgttacctctgtaatccctttggccattaagccagccgttacgagagctgctcctgctcgtaagtccgacgctttcacacgtgcaccttgtaagtgaatgggaccattaataatagcagaacgtccttctaccttaacagatgcattcattcgtctcagctcatcaatatgcttaaaccttgcaccgtaaattgtatctgtcacaacgcttgtaccagacgctcttgttagaagcgtcgtaaatggctgctgtaaatcagttggaaaacctggatatactagcgtcttaatatctacgggcttcaatagctgacgagtcgctacaagaatttgatctgagcttgtttcgatatgaatacccatttcacgcattttagccgttaatgactccaaatgctgagggataacgttgtccacaacaacttcttttcccatactcgctcccatgatcatatacgtgcctgcttcaattcggtctggaatgatggaatgacggcatccttttaattgatctactccatcaattcgaataacatccgtacctgcacctttaatacgggcacccatacttgtcagcaacgtagctacatcaataatttcaggctctttagcagcattctcaataacggtacgcccttttgctcttacagcagcgagcataatattgattgttgctcctacgctaacaacgtctaaataaattcgagcaccaatcagttcctcagctcgaatgtaaatggctccttgctcatttgttactttagcgccaagagcttcaaagcctttaatgtgctgatcgattggtctaggaccaaggtaacagcctcctggaagcccaactaccgcttttttaaagcgtcccaacatcgcccccattaaataataagaagcgcgtaatttttttacttttccgttcggtaaaggcattgcaaccattccggatggatctactgttaattcgtcgttatcaatggttactttcccaccaatttcttcaactaaatcccctaataactgcacgtctgaaatatcgggcagaccttcaattgtaacaggtgactcggctaaaattgttgctggaataagcgcaacggcactatttttagcaccactgacgcggacggatccacttaaggtaaagccaccttgtatttttaacttttccatttatagctcccttctagtgaaagaaagtttctcacctagtaattgaggaaaattttggtacaaagaatacctaaaagaatggttatttttcctattacctactagtgtacacgaaaatgaaaaaatcatgtatagtttcgacaagataaaagaaaaatatggcattcacctgtcaggatggtaaacgccacacaaatttatacatgtttagacatttcgtttttcccaatctgccaaaaattggtcaattcctgcgtttgttaacggatgtttgaacaattgcattaaaactttgtaaggaattgtcgcaatatgtgctccattttttgcagcttctgttacgtgcatcggatgacgaatagatgctgcaataatttctgatggaatgtcatgaatcgcaaaaatatctgcgatatctgagattaaatcgagaccattaaaaccaatatcgtctaatcttcctaagaaaggcgatacgtaagtagcacctgctcttgctgccattaacgcttggttagctgagaaaataagcgtaacgtttgtcttaatacctaaactagtaaattcttttactgcttttaagccatctggagtcatcggtaccttgattgtgatattcggcgcaatcgcagcaagctcttttccttcgcgaatcatgccttctgcatcaagcgcaatcacttctgcacttacagacccttcaacgaactctgtaatttcacgaagacgatcttcaaacgtgatgttctctttagctactaaactaggatttgttgtaacccccgctaacaaacccaatgaatgcgcttccttaatttcgtctaaattagccgtatcaataaaaaacttcatgaatgccatccccctgtgttatgtattcagaatgataagaaaattatagtaaaaataaaaccgccttacaataaaaataagacggttttatttttcagaatcaactaactgcaaacaggcaatccgaagatttcaaattatgctttgttagaagaaccgaattcacgcattttaccttgaaccgtttctttgattgcttcgcgagcaggtcctaagtatttacgtggatcatattgttcaggttgcgcagctaatacttcacgaacagctttagctgaagcaatttggttttcagtgtttacgttgattttagcagtacctaaagaaactgatttttggatatcttttgttggaataccagttccaccgtgtaaaactaatggtaagcctgtacgatctccgatttctttcatttcagcaaaacctaggtttggttcacctttgtatggtccgtgaactgatcctaatgctggagctaagcaatcgatacctgtacggttaacaagttcttcacactcgttagcatctgcatagataacgccttcagcaataacgtcgtcttcttgtccaccaacagttcctagttctgcttctactgatactccgtggaagtgagctagttcaactactttagaagtaattgcaatgttttcttcaaatggatggtgagaagcatcgatcattacagaagtgaatccagcatggattgcttttgcacatgattcaaagcttgaaccgtggtctaagtgaattgcaactggtacttgaacgtcgtaatcttcgattagagcttcaaccattgctacaacagttttgaaaccgcccatgtagcgtgctgcaccttcagatacaccaagaataactggagagttttcttcttttgctgcttgaagaatagcttgagtaaactctaagttatttaagttaaattgacctactgcatagccttgttcttttgctgtaataagcatttctttcattgatactaaaggcatattgaaatcctccttaaaatcaaccttagattagatgctaaccaaaaggcacactcaaatagtatgctcttgaattgagtgtttcatgtagaaacaacgcgcatctttacataatagattgtcgaattatgaatacagtaattaggataccaactaacaatgaaaacagcaacatttttaggctgatattcaaaatttgttaggatgaaaaccctaccaaaaccttaattcgactttactggtatatattccctaacaacttttcggatttcatcaatatcaaacggttttgcaaagtgtgttaatgctcctaaatcttttgcttcttgaatcatatccaattcaccataagcggtcataataatgactttaattgcttcatcgtgctgctttaacctttttaaaatttcaattccatccattcctggaattttcatatctaataagacaagatccggtgcttgctcttttgtaatatcaatcgcctggaagccgttcgccgcttgaaatgtcgtatagccttctttttgcagcacttccgttaataaaatacgtataccatactgatcatcaacaattaaaattttctctgccaatataatcccaccttttatattcctcttctacagacaaaactaacatatgtatttcgcctttaaaacaaaaatccctgcttattagagaaattgttacaaaacatagctttttttgtcatccatccaacttcattgcactttactttcattgtagctcatttcaagatagaatacagatagcttttttcgttatactgtgtagatagacggctttagccgcttaaatcgaagggagattctatgcttaaaattttcacaactcaactttcaggtttttttaaacgaattgaagaacaagaagaattccaatttgaagatgcagcgcgtattttagcacaggcctctgtcggagaaggatttatctatatttatggtgtagaagaaatgcacgccattacgcttgaagcactaagcagtgcagaacctttaagtcaggcaaaagctttgcctttacatgaattagatcagctgactagcgttgatcgcgtactgcttgtctctcgattttcaacagataataaagcaatggaaatagctgaacgtttaaagaaacgggatattccatttgttagcattgcggctgttcctaaagagatagccgaaccttctttaacagcactcgcagatgctcatattgatacaaaattgttaaagccgcttattcctggagaagacggctcaagatttggttttccagcaatgatggtcgctttatacgcgtactacggtttaactttcacactaaaagaaatcgtagaagaatatgaataaaaaacacgctgtctaaagacagcgtgttttttatttcacttatttgttttggcctgactccattgatgcgcgaataaattctctgaacaatggttgcggtcttgttggacgagaagtaaactctgggtggaattgcgaagccaagaaccatgggtggtcttttagctctacaatttcaattaaacggccgtctgggcttgtaccagagaagataaagcctttctcttccatttgttgacggtattcgttattaaattcataacggtgacgatgacgctcatataccacttcatcttgatatgcttcatatgcaagcgtatcttcagacaatttacaagggtatagtcctaaacgcaatgtaccgcctaggtcctctacgtctttttgttctggtaataagtcaataattggataatttgttccaggtgcaatttccgctgaatgtgcgccttctaagcctaatacattacgcgcaaactcaactgatgccagctgcatacctaagcaaatacctaagaatggaaccttttgctcacgtgcatattgtgttgctacaattttaccttcaattccacgatcaccaaatccacctggaactaagataccatctacatcaccaagtaaatcttgaacattttcttttgttacaaattcagaatttacccacttgatgtttacatctgcatcgaatgcatatccagcatgtttcattgcttccacgacagaaatataagcatcttgaagctctacatacttaccaaccaatgcgatttttgtcgtatttgaaagtccttttactttctcaaccaatgctttccactcagtcatttctgcttctttgcaatctaatttcaagtgatcgcatgtgatttgatctaagtgctgctcttgtagagatagtggaatttcatataatgtttcagcgtctgcacactcaataactgcttttggatcaatgtcgcagaataaagctagcttatctttcatatcttcagaaattggcatttctgtacgaacaacgattacgtttggctgaatacctaagctacgtaattcttttacactatgctgtgttggttttgttttcatttcaccagcggcttttaaatatggcacaagtgtacagtgaatatacataacgttgtcacggccaatatcgcttttgatttgacgaatagcctctaggaaaggaagtgattcaatatctcctaccgttccgccgatttcagtaataacaacatctgcgtttgtttctttgcctgcacggaaaacgcgctctttaatttcatttgtgatgtgcggaataacctgaactgttccgcctaaataatcaccgcgacgctcttttttcaatactgttgaatatactttacctgttgttacattgctgtagcgatttaagttgatatcgataaaacgctcatagtgacctaagtctaagtctgtttccgcgccgtcatctgttacgaatacctcaccgtgttggtatggactcattgttcctgggtctacgttaatgtatggatcaaacttttgaatcgttacgttcaacccacggttttttaataaacggcctaaagaagctgctgtaatcccttttcctagagatgatacaacaccgcctgttacgaaaatatactttgtcatctatacttccccctctaaataatttgaactgtacaatattaaaagttttcacataaacaatcacaattcattcattgtgcatgcgaaattataagaaaccttatgaatgtgaaacgttcaagaaccaaaagaaagtttctatcaaggatttataagaacatatcggggtgtaaaacattgatacataaaataaaaaaattgctcccaataccaaaactggattgggagcaatagtctattttaaataaaaactttttaaatgcttgtttaaagagcccaaaaaagattctacctacttcgcttgaaaaagtcaagaaggattatttttctttttcgtcctcataatcgtcttcttcatcttcctcatcatcgtctagatcatcttctaaatcgtcaaaatcgtcttctgcaagatcatcttcatcttcttctagctcgtcgatgtcttcaaaatcttcttcttcgtctagatcgtcaacatcttcataatctaaatcttcttctagatcatcaaagtcttcaacttcttcaacaacagcttttttcgcttttttctttttaggttttgcaaccggaataacttcttcttcagcctggtcaaaaggataccatccacgaagaccccagtggttgtcccctactgttaaaaagcgaccatcaatattaatatctgtataaaactgagctaatctcgtttttaattcttgatctgacatttccgctgctgctttaatttcagcaataatttcttggaatgacattgcttgacgatctgttttttcttctagaagcgcgtaagcaatctcaatcatcgacatttcttttaaatccgtttttgagtactgtgctaaactcaaatctggcacatcctttctatggctatgtatatcgaaaatctattaaatcaattcatcatatgtgtaaatgatggaaacgaataaatacataccattcattataaacaaattcaatacatttatgctagcctcgtttctaaaattctcgagaatttcgcataaaacaacgaaaaaatagacattttattactataatacattctacttgatataccaacagcatcctttgaccaaaaggaattcaccatcagttgttctgagtccgttagggttaagtctataaaagccgcgatgaccaaaaatggtcatcgcggcttttaatatatcactatatactaacgatacattattacatatttcgacgatattgcccaccgcattcatataaagctcgcgtaatttctcctaagctggctactttaacggtctccattaactctttgaaaatgttctctccttctgttgcagctttctttaaccttttcagcgcatcttctcttttttctttatgctgctgttgaaacttctgaagctgattaatttgatgatttttttcttcttttgatgcgcgggctaactgcatgtcatcaactgaggaattttcctcttcatttggattaatatacgtatttactcctataataggtaaatctcccgtatgtttttgcatctcatattccatcgattcatcttgaatcttacctcgctgatactgcatttccatcgcacctaaaacgccgcctcgatcatttaagcgttggaactcagccaataccgcttcttctaccaagtctgttagttcatcaataataaaagagccctgtagtggattttcatttttagttaatccatgctcttttgtaatgattaattgaatggccatcgctcttcgtacagattcctctgtcggcgttgtaattgcttcatcatacgcattggtatgaagagagttgcagttgtcatgaagggccattaaggcttgtagcgtcgtacgtatatcattaaagttaatttcctgtgcatgaagcgatcggccggatgtttgaatatgatacttaagcttttgactgcgttcattcgcgccgtatttatcacgcatcacaattgcccagattcttctcgctacacgtccaataactgtgtattcaggatcaagtccattactaaagaaaaacgataaattaggagcaaaatcatcaatgtgcatgcctcgactcaagtaatattccacgtacgtaaagccgttggccaatgtaaacgcgagctgagaaatcgggttagcccctgcttcagctatatgatagcctgaaatagaaacagaataatagttgcgcactttctcgtcaataaagtactgctgaatatctcccatcattttcaatgcaaattccgtggaaaaaatacacgtattttgcccttgatcttcttttaaaatatccgcttgaacggttcctctcacttgtttcaacgtacccgattttacgtcctcgtattcctcttctgttaaaggacgcttcatctcctcttccttcttctccacctgctgacagatagctgtattcataaacatagctagtaatattggagccggcccattgatcgtcatcgaaacggaagtcgacggatggcaaagatcaaatcccttatacaagagtttcatatcatcaagcgtacagacatttacgccgctttcgccaattttcccgaagatatccggccttggatccggattttctccataaagcgttacagaatcaaacgctgtacttaaacgcttagcgtcatcatcttttgacaaatagtgaaagcggcgattcgttcgttctggtgttccttcgcctgcgaattggcgcttaggatcttctccttttcgtttaaacggaaaaacacctgctgtataaggaaacgcacctggcacattttctttataaagaaaacgaagaacttccccgtattcttcaacttttggaagggccacgcgcggaatacgcagtcccgatagggtatcaacttgcagagaggttttaatttctttatttcttatctttgtaataagttcttcttgccgatactgactttttaatttaggccagttttccagcttttcaatcgattcagccgttagccgtttttgatatttctcctttagctgagtgagctcttgcttggccgtttctgtttccacttcttccaaagcaccctctagctgataaaatttacgcgctgtttgcacttgaacatccgtattgcggtgataagagcgaacgctgtttacaatctcctgtaaatattgctgttgatcattaggaatgatggtatatttcttttcacttacgcgctctgatgatttttctacgtgccaagacgtacggcatgtttgatgcagatgatttacaagatcttcaaataaaatatttgttcccccgtcgttgaactgactcgcaattgttccgtaaattggcatcgtagagagattattttcaaacagctgatgattacgctgatattgacgctgcacttgtttttttgcgtcttcggaaccttttttttcaaatttattgattacaataaagtctgcgtaatcaatcatttcaatcttttctaactgcgacggcgcgccaaattcgcttgtcattacatacagagagacgtttgcaatatctttgacttgagcatcagcttgcccgatgccgcttgtttcgacaatgataatgtcgaaacccgcttttttcacgacggcaattccatctcgaatggccgccgatagctcatgtccagatgagcgcgtggccaaacttctcatatacacacgaggagacgctgcgatgttcatgcgaattcgatccccaagaagcgctcctccggttttttgtttagttggatcgacggataagacagctacatgaatatctggaatatgttcaataaaccttcttactaattcatccgtaagtgaacttttccccgctcctcccgttcctgtgattccaataaccggtattttttgatccgtctcgctttcgattacacttcctcggatttcttcaagagcggctgcatgctcttttgtgtattcataggcttcattttcagcgcatgtaataagctgggcaattaaacggttattagccggcgttaaggttcgatccttcggcagtgcagggggatttgtgtaataacaatcatcgatcatgaattgaatcatgccttctaaccccatttttcgtccatcttccggagaaaagattttagaaatgccgtaatcatgaagctcttgaatctcactcggaataatgacccctcctcctcctccataaattttaatatgagaagcctgttgttcttggattaaatcatacatatacttaaaatattctacgtggccgccttgataagaagaaatagcaatcccctgaacatcctcttgtatggaagcgttaacaatttcttcaacagatcggttatgccccaggtgaatgacttctacccccttggcttgaagaattcgtctcataatattaatggacgcgtcgtggccgtcaaacaggctagaagcggttaaaaaacgaagcggtcttttgcttgtattcaaactgtctccccctcacacagttgttgaaatgaaaaatttttaagtaaaaaatctaactgcatatttgtatattcttctaatgaataatgcttttgcagccaccatctgcgaaatgcccacatctgaccttgaacaaataaatgatgagcgaacagcgaaatttctttatccgtaagtgcaaattgattgttttctacgcagccttcgataataaccttaaacatttcaaccatatccagctctttttttaatacatatggaagcgcatctttagacagcgatttcgcttcttggtacatgactaatacttcatcttgaagctcatccacaactttaaaatagtgctgaatcgcttgttgaagctcagagattgtataacgatccactaccatctcttctaatctctctctcacttcatcataaatattgtcacatacaagatataaaacatcttctttagactgaatatattcgtaaagcgtaccaatgctaaacccagcggctttggcaatctcccttgttgttgttcggtgaaaacctttttccttaaatagcgtgacggcccctttaatcatttgattacgacgctctacaatcagcttttcatctttaatggatgtgagaacttctctctttttcattttttcacctctcctacaacaagtgttttatttagcaagatacctagaaatgacaagacgctgaatttcttgtgtgccttcataaatttgcgtgatttttgcatctctcataaaacgttctactggataatcttttgtataaccgtatcctccaaatacttgaacagcttctgtcgttactttcattgctgtatccccggcatataattttgacatggctgattctttgccatatggcagcccttgagactccagccaagcagcttgataggttaacagtctggcagcttctatactcgtggccatgtcagctagcttaaaagcaattccttgctgagaaataattggcttaccaaattgctgacgttccttggcataagctacggccgcatctaatgccccttgagcaattcctacagcctgcgctgcaatgccatttcggccgccatctagtgtcatcatcgcaactttaaatccttctccttcatttcccagcaaattttcttttggaacacggcagtcctcgaaaataatttctgtggtaggtgaagagcgaatacccagtttcttttcttttttaccaactgaaaatcccggcatatctttttcaataataaaagcgctcgtgcgtttttcattggggtcgatgcgagcaaatacgacgtaaatatccgcttcgccgccgtttgtaataaagattttagaaccatttaaaatataatcttctccgtcctttacagcgagcgttctcattcctcctgcgtctgatccagcactcggttcggttaatccataagcacctattttctcacccgttgccataggtttcaggtatttttgtttttgttcttctgttccgaatgtatagattggccagccggctagagaagtatgagccgacaacgtaacgcctgtcgatgcacatactctagacagttcctcaacggcaatgcaatatgctagatagtcactgccaattcctccgtattgctccggccatggaatacctgttaatcctagatcagccatttgcgtaaagattcctctgtcaaaacgttcttcttcatctcgttgtgcagctgtcggagccacttcgtttttggcaaagtcccgcaccatttttcgaatcatttcgtgttcttctgaaagtttaaaaaacatgattattcccccctataattgactgctaatgacgatgcgctgaatttcgcttgtaccttcgtagatttcgcatactttggcatcgcgaaaatacctctctactggataatctttcatataaccatagcctcccaaaacttgaatcgcatcgattgctacattcatcgctgtttgggaagcaaacaatttcgccattgaggcttcttttttacaaggaagtttttgatcatataaaaaagccgctctatacattaaaagcttcgctgattcaacagccgtttccatatcagccagtttaaaggcaataccctgctgagataaaatcggttttccgaattgatatcgttcatttgcatagtttttagctgccgttaacgcaccttcagcaattcctaccgcctgagcagcaataccaattcttccggcatttaaattagccatcgcaattcgaaagccttctccttcttctccgagacgattttctacaggcacctgcatattttcaaagtgcagttgaaccgttcgagaaccgtgaagacccatcttatgttcatcttttcctactgaaaatccctccatcgtcttttcaacgataaaagcgctcatccctctcgacccgcgttcggggttcgttttagcaaatacaatatacgtatccgcttctccaccgtttgtaatgaaaagctttgagccatttaaaagatagtggtctccttttcgttctgcctttgtttttaagcttgcagcatcagaccctgcactaggttctgttaaacaaaaagcacctaaatatttacctgtcgccagtttttttacatatttttgtttttgatcttccgtcccaaatacgacaataggattcgtacctacagaagtatgaacagacaaaatgacgccgagggctggacttacttttgatatttcgtggatggcaatcatgtacgacacaaagtccagtccgccccctccgtatacttgaggaacgggaatgcccatcagacccagatcagccatctgctttaataaacctcgaggaaattcacccttttccatgtttggcacagccgcagcgacttctttttcactaaaatcagctaccatctttttaatcatgtgttgttcagatgtaaaaaagatcatttcgccactcctttatgtttcgtacgtaaaaaatccttttcctgtttttcgaccaagccaccctgcctttacatatttcctaagcaatggacaaggccgatatttgtcatcaccaaatcctttatgaagcgtttccataataaacaaacatgtatcgaggccgatgaaatctgctaatgtcaaaggtcccattggatggttcattcctagtttcatcacttgatcaatatcctcttcgtttgctacaccttcatagagcgtaaacactgcttcgttaatcattggcattaaaattcgatttgaaacaaaccctggaaaatcatgaacttccaccggggttttatttaattttttcgttgtttcatagactgcttgatacacttcatcggtagtagccagccctctaataatttcaacgagtttcatcaccggaacaggattcataaagtgcatgccaattactttttcaggtcgagtggtcacagctgcaatttcagtaataggaagcgaagacgtgttggttgctaaaacagtatgatttggggctaacgaatccaactccgcaaaaatggcttgcttgacttccatcttttccacaaccgcttcgacaattaaatctgctttttgtgctgctgttatttcgtttgccaggtgaaggcgctccataatttcttcatattccttagctgagagagaaccttttcccacctgctttttcagacgtttatcaataccttctattcctttttgtgtatttttttgatcaacgtcatacaaagaaacttgatatccgctcgcagcaaatacttgcgcaatgcctgctcccatctgacctgctccaataaccataactgtttcaatattcaagtcggtatcccccttttatacttctaccatgatggcatcaccttggccgccgccgctgcaaatagaagcaatgcctagtccgccgcctcttcgtcttaattcatgaatgagcgttacaacaatacgggcgccgcttgctccaatcggatgtccaagtgctacagccccgccgttcacatttactttttcagccggaagccctgcaatttccatactcatcaacgctactgctgaaaaagcttcattgatttcaaacagcgcaatatcgtctactgtcttatttgttttttgcaatagcttgttaatagcaaacccaggcgttttcggaaactcccttggctccatcgcaagagaagtatggtttataatcgtagccaacggctcatagccatttgctttcgccacatcttcatccattagcatgagcgcagctgctccgtcattcacgctaggtgcatttcctgctgtaatggttccactgtggccaaatacaggccgaagagacgagagtttttctaatgacgtatcttttcttggtccttcatctttttgaaccgttatcgttccttttttagacggaatatcaactgaaattctttctgcatcccatctccctttttcttctgactctactgctaattgatgactgcgaagcgcccattcatcctgcttttctcgggaaatatccatttcagaagcgatttcatttccatacgtacccatttgaacccctgtaaagctgcatgtcaaaccgtcatgaaccatcaaatccgtcacaacgctatctcccatacggaacccccaccttgcttttggaagaagatacggtgcattactcatcgattccattccacctgcaatgattgtttttgcttctcctaatcgaatcagctgatcagcagttgtaatactgcgcatacctgatgcacaaactttattaatggtttccgtctctacttgccacggtaaacctgcataatgcatggcttgcctagaaggtagctgtccttggcccccttgcagcacgcaccccataataacggaatcaatttctgtacgtccctttgatgctgcttgaatcgctttcccgcctagttctgccgcttttagtccgcttacactgccacctaattttccaaaaggtgttcgaactgcactcacaataactgttttccccattattgtttcctcccctttttcctaatctttgtccttgccgattgaacgcttgctcaatttcctttctgtaaaaagtagagatgaataccatctctacttctcctttatgaaacctgttcttgcacgtcaccataaattgacttttcaagcagttctgctacgtcatacgtatgaaccttttcttctacttcttttgcttttgttccgtcacttagcatcgttaagcagtacggacaacctgaactgataatgcttgggttaacggccaaggcttgttccgtgcgcgctacgttaatgcgctggccggtcgtttcttccgtccacattaaccctcctcctgctccacagcacataccattttcacggttgcgttccatttcaatcaaactaacacctggaatcgctttcaaaatttctctcggtggactgtatacttcgttatatcttcctaaataacaggaatcatggaaggtaattttttcattaaccgcatgttttggtgtcagcttaccttctttcaccaacacagctaataattctgtgtgatgatacacttctccttcaaaaccgaaatctggatattcatttttgaagatattataagcatgtggatcaatcgtaacaatttttttgatttcatttttttcaaattcagcgatatttttagaagctaactcttggaataaaaattcattgcccaacctgcggggcgtatcaccagaatttttttctttatttcctaaaatcgcaaatgaaacaccagcttcattgagaagcttagcaaacgatagagcgattttttggctgcggttatcataagatcccatcgaacctacccagaacaaatactcaaacgtttcaccagctttacttacttctttaacagtcggaatgtgaacatcctctcttacatgtcgccattcttcacgctcttttcggtttaatccccaagggtttccttgacgttcaatattcgtcatggcacgctgagcatccgcgtccatctttccttcagttaatactaaaaaacgtcgtaaatctatgattttatctacatgctcgttcattacgggacattgatcttcacagtttcggcacgttgtacatgcccaaatttcttcttccgtaatgacatctccgattaaagcgggattatattccgctgttgctgcagcctctgctccgccttggccggccgccatcatcgccagctgatttccttttgttttggagaatgcatacgtaggaacccaaggtgccttggatgtcacaaccgctcctttttctgttaagtgatcgcgcatctttaaaattaaatccattggagataaaattttccctgtacccgttgccggacacatattcgtacatcgaccgcattccacacaggcatataaatcaataagctgatgctgcgtgaattcttcaatctttccaaccccaaacgtctcctgggtctcgtcttcaaaatcaatcttttcaagcttacctggcttagaaacacggttaaaaaatacattagccggtccagccagtaaatgagcatgttttgattgaggaacatatactaaaaacgtcaataacacggctaagtgaatccaccatgaaacataaaaaatggagatagcggcaatatcattgattcccttaaacaagatcgcaatcgatgacgcaatcggttctgtccatgacggttcatgattatgccagatgattgacataccgtttccgacaagcactgacagcataagtgctccaataaaaatcagtactaaaccagatttaaaccctctttttaaacgcacaagcttttctacgtagcgacggtgaaaagcccagacaactgctactaaaatcaaaagtgtcacaatttcttgaaaaaatgtaaaaccgggatataaaggtccaagcggcaaatgtttacctggaagcaaaccttttataatgaagtctaacgcgccgaactgaaccaaaataaacccataaaaaaacatgacgtgcataattccactttttttatcttttaacagcttcttttgtccaaacacgttcacccaaattttttgcagtctttcttttaaccgctgatcaaattcaacttttttccctaattgaatatactcaatgcgtgtgcgaattaaatatacaaacaaagaagcagcgtaagcggttacaataataaaaaagagaaaattcacccacagcaaccctgtcatctcgtcccctccttgaatagtttgttacctttctttcctcctgacgactaaattttctgataatatatctgttttcattgtatataatgaatgagcattcagtcaatatcttttcgttcttttgttcatattctatttaaacaaggtgacactaagaacaacataaaatgtatttacatcgggaaaagaggtgacatgatgagcggcatggttgtaattttactttttattatttttattgcttggcttgcaattgaccttggcgttggaaagaaagtattttctcaggctgaaaatacatttccaaagcgccgtgcttctctttttttgttcgcagacgggaatgtcttgtataaagatctatttcacgaaatagaaaatgcctcttcgtttatccatttatcgttttacatcgtacaaaatgatgaaattagtcaagattttttagatttactagtccaaaaagcacagcaaaatattgaagtccggttattggtagaccgtgtgggaagctataaaatcaagaaaaacaaaattgcattcttaaagaaacaaggtgttcattttgcttacagtcgaacgctacgatggccttatttgttttatacactcaacgcacgcaatcaccgtaaaatggccgttattgatgggaaagttggctacattggcggttttaatatcggaagagaatatttaggactcgacgccaagcttggagtgtggaaagattaccacctgcgtatggaaggtaaaggtatccaagatcttcaaatacagctgttgagcgactggtatgctgctaccggcatagacctgcgtaaagtggaaagatactttccaccaacctctgaaggagactatgttattcagctacagtcaactgaaggtttttcacttgaagaaagctttttatcgattatcaaccaagccaatagggaattgtacataggtactccttattttattccaagtgaacctttgatgaatgctttattgcaagctcgagcacggggagtacaagttcatatattgattccaatgcgtgcagatcaaccgcttgttcatcatgctgcatttgcctatcttcctacattacttcaagcaggctgcatgatttatcaatattattacggtttttaccacgcaaaagtattaattgcagacaatgttatctgcgatgtaggaacggctaattttgataaaagaagcttgttcttaaacgctgaaattaactgtttaatctacgatgccacatacattgaagaggtaaagaacagctttaaagcttgtatgggggaatgcccagttttgtctttagaagacgtcaaaaaccgaaaatggagtgaaaaactaaagcaaggatttgcaacctttatttctccgttactttaatgaacgaaaagaggaaaatttataatgaaaattagatttggctatgtatcacatgccctgtcgctttgggactgctcacctgcgaagactctcacgtttactagatggaaaaaaatgaaaaaagatgagaggctggataagcttcattacgtcacaaaacaaaatttgaatcatactaagcgcgctttacattttaatattgcccatgaaattatgctgtatcgattatcatcttctcttgttcctttagctactcatcctgaagtagattggaattacattgatgcgttccaagacgattggtcagagataggagaattgattcggaatcatcagctgcgcgtgagttttcaccccaatcagttcacattatttacaagcgacaaaaaacatattacagaaaatgcggtaaaagatatggattatcactatagaatgcttgaagcgatgggagtagccgatcaagctcttattaatattcatgtaggaggagcctatggcaataaagaaaaggcgatcggtcgatttcatgaaaacattcaaacgctgccacctgtcattaaaaagcgcatgactcttgaaaatgatgataaaacatacacaactgaagaaacgttagctgtatgcgaaaaagagaaagtccctctcctctttgattatcaccaccacaaagcaaatgaaggagaagaacctcttgcattattgctccctcgtatctttgacacgtggaaacatatcgggttaaaaccaaaaatacatatctcttctcctaaatctgaaaaagaattcagaagtcactctgattatgtctcaactgattttatcgcaccttttttgcaaatagctaaagatattggaaaagattttgacgtaatgattgaagcaaagttaaaagataaagcgctgctaaaattagtggaagatttagcatcaatgagaggagtaaagcgtacgggaggtgccacgcttgttttttaaattaaaaaagagccaagaggctctttttttgttacattttttcgggtgctgaaacaccaattagttttaaggagttttgaagcgttacttgaacagctttcactagttcaatacgcgctttacttgtttctatattatcgctgtctaatactttttctgcattatagaagctatggaacgtagaagcaagatcaaatacatagtttgtaatgcggtgcggaatacgttttgttgctgcttccgctacggcctgagggaactctccgattttcttcagcagttccgtttctttttctgcactaattaatgaaaggtcagcgccagatgttgattgaatccccatctcttcaccttgacgaagaatactgcaaatacgagcatgagcatactgcgcgtagtatacagggttttcattagattgagaaacagctaaatctaaatcaaagtctaaatgtgtatccgcacttctcatcgcaaagaagtagcgagttgcatcaaggcctacctcttctactagatcacgcattgttactgctttacctgtacgtttgctcatcttcattttttcgccattttgatacagttgaaccatctgaatgatttctacttcaagcgtatctttttcataaccaagcgcttgaatcgccgctttcatacgaggaatatatccatggtggtcggctccccaaatgttaattagcttatcaaatccgcgttgaattttgtcttggtgatacgcaatatctggtgttaagtacgtaaatgaaccgtcatttttaattaacacacggtctttatcatcaccaaatgtcgtagaacggaaccacgtagcaccttcttcttcatatacatgaccttgttttttcagggtttcaagtgcaactgatattttatcatttttataaagagacgtttcagaataccatacgtcaaatttcacacggaactgttcaagatcacgctttaatttagctaactcataatctaacccgtattgacggaagaattcaaatcgctcttcttcagaggcatttacatacttgtctccgtgctcttttgctagctcttttccgatgtttataatgtcagcaccatgatagccgtctgcaggcatttctttctctaaaccaagagcctgcatgtagcgtgcttctactgaataagccaggttattaatttgattaccagcatcattaatatagtattcacgtgacacatcgtaacctgctttttcaagaacattacataatgagtctccaactgcagcaccgcgggcatgtcctaaatgtaaatcccctgtcggattagctgaaacaaactcaacttgtattttttgtccgttccctacgtttgtttgaccgtacgcttcaccagcttttacaatcgttgggataagctctgttaaataagagttattcatataaaagttgatgaatccagggcctgcaatgtcaattttctcgatagatgcttttgatttatcgaagtttgctacaagctcttcagcgataacacgcggtgcttttttggcaatacgagctagctgcatagccatattggtagaataatcaccatgtgttttatcttttggggtttctaatagaacttctggaagttctgctttttcagcaagtcctgctttgaccacagcatcttgaatttcagcttttaatttttgctgcacttgttcgacgatgttcattttttctcctccttgaatgtaatggttaacgcatatttcccggtaggctgaccctgtacttctagatcatacgttaaaaataatcgacccttttgagtcatttgtttatattcaatgttatgagcgaatgtcagtaaatccatacgtccataagggcttatataagttccttcgatctgtacctttttacgaaacgattgcttcatttgaacagcaccggttcgattaattgatacttcatcttcgctaattttcaccattgttctaatatctccgatttcctcttggcgctctgtgtatgtaagataaattttcgatcctttttcataatacataccttttgcatttaccgatgttgtctcttttcggtgaccatcgcggatatccgtcacaattttaacttcaatgggtttcttgacttctgaagcgttactcacaaaagacacttccttattaaaatgaatacgttataacttaaatagtataaacattctaaagaaagaattcaataatacttcaaaggaaatatgatagatacgccgagaattcacctttttacagtacgtgacgcattcacatattccaaataaaaaaggcagccacagcggccgccttttactttatttatttcttttgtacccagcctaagatcatttcgcgaataagcttgcttgctgtattagctgtttgttcagacggatcataaattggagctacttctactaaatctcctccgacaatgcgaagatctgatttagcaattgcgtgaatagaagctaaaagctcttttgatgtgataccgcccgcatctactgttcctgtaccaggagcgtgcgctggatctaatacatcgatatcaattgttacataaacaggacgacctgcaagtgttggtagaatctcttttaacggctctagaacttcaaattttgaaatatgcatgccgttttcttttgcccattgaaattcttctttcattcctgagcgaataccaaatgaataaacattctccggtccgattagttctgcaactttacgaatcggagtggaatgagaaagtggttctccttcatactcttcacgaaggtctgtatgagcatccatatggataatggccaaatccggatattttttagacatagctttcataacaggccaagaaaccaaatgctctccgcccatgcctaatgggaacttgtctgctgctaaaagctggtcgatatactcttcaatcatatttaagctgcgctgaggattcccaaatggaagtggaatatctcctgcatcaaaatattttacttcctctagctctcgatctaaatacgggctgtattcttctaatccaattgatacttcacgaatacgagttgggccaaatcgtgaacctggacgatagctaactgtccagtccattggcattccgtaaagaaccgcttcactttcttcaaaaacagggtgactgccgataaatacattacctgaataagcttcatcaaaacgcatattttgttcctccttcattattcatagaaaagatgccagccttaaacctctggcatctcacttgtatgtggtaacttatttaataagatcttgcacaaatttaggtaaagcaaatgcggctttgtgcaattcttttgtgtaatactttgtatcaatatcgaagaaacgatcttcgcttacttctaatggatcatgtttctttgaacccattgtaaatgtccataaaccgcttggatatgttggaatatttgctacgtatagacgtgtaatcgggaagatttctcttacatcacgctgaacatttgagatgagctctggcgtgaaccaaggattgtccgattgagcaacaaagataccatcttctttaagtgcttttgagatacctgcatagaatccttttgtaaataaattcacagctggccctactggctctgttgaatccactaaaatgacatcgtattcgttctcgcttttagcaatgtgcataaatccgtcatctacttgtacatcaacacgcggatcttctagtttgcccgcaattgaaggtaagaatttttttgagtactcaataacttttccatcgatatcaactaacgtcgctttttttacgcttgggtgttttaagatttcacggattacgcctccgtctcctccacctacaactagtacgttttctggatttggatgcgtaaataacggtacatgcgcaaccatttcatgataaacgaactcatctttttccgttgtcataaccataccgtcaagtaagagcatgttaccaaactcttctgtttcaaccatgtctaatttttgaaactccgtttgctctgtatgtaaagtgcgattaattttagctgtaataccaaagttctttgtttgcttttctgtgaaccataattccatttcaaactcttcccttctattttgagaattaacctatgcatagattaccctaacataatttatacaaacatgaaaaaagtatagatgaattcagcaaaaaagcaagtaaaatttttagcaatgcaggtttaaaaccaccttttctatttcatactgatgatagatacaagctttagaatctacttgcatcgctcttttaatagaattttgttgtgttgaaaacaacatgtacggtgcatagtgacacatattggtggtgaatagaaatggaaacggtattaaccgaacatttaaaaaaggcaagacgcatcttccgaattcttctcgtccttggtatattagcgggggctttattattgtttgcctacataagcatctttctctacgctaaaatcgctggcccccctccgctaaacgtttctcaaacagctgttttctactcagcaaacggtaaagttcttgatgaagttcacaatggacaaaagcgctactgggtttcacttaatcaaatttcaccttacgtaaaagatgcgactttagccgttgaagataagcgtttctatgagcatcacggctttgatatgcatcgaatcgccggagcagttgtagctgatataaaagctatggggaaagtacagggtgcgagtaccattactcagcagtatgcacgaaacttgtttttagagcacgacaaaacgtggactcgaaagcttcaagaagctctgtatacgattcgtttagaaatgaactatagtaaagaccaaattctagaaggctacatgaatacgatttactacggccatggagcttatggaattgaagcggcggctaggctgtattttgataagcatgccaaaaatttgacattaagtgaagcgagtatgttagcaggtattccaaaaggccctagctactactctcctcttattcatcaagaaaatgcaaaaaaacgacaaaatatcattttatctcttatgaaagaggatggaattatcacagccaagcaagcaacaaaagcgcttgtaacacctctagcattcacaaagcctgccgaaaaagatcctaataaagaagatgcttcttactttatggatgcagcgctagcagaattaaagcaagatttaggcattgatgaaaccatgatttacacaaatggacttcgcgtttatacaacgctggatgaaaagatgcagcgaacagctgaagaaaaaatgaaggatgttatcagcagctcttcagacgtacaaagtgcatttgttgcgatgaatcctaaaaatggacaagtgaaagctcttattggtggaagagattatgaaaagagcccgtttaatcgcgcgactcaagcaataagacagcctggttcaacgatgaagccatttttatactatgcggcgttaaaagatggttttactgaatctactccaatgaaaagtgaagaaacgacgttcaaattggaagatggcgtttcgacatacacgcctagcaactatcacaattattatgcggatgctcctattacaatggctcaagccatcgcactttcagacaacatttatgccgtaaaaacgcatttgtttattggggaaaaccgcttaattgaaactgctaaaacacttggaatatcatcacctttaaagaaagttccatctttagctcttggaacttcgcctgtgaaagttattgatatggttaatgcgtacggcatcttagctaatggcggaaaagaaattcgtccaacatttattaaacgaattgaaacccatgacggagaagttgtttatcaagctccttccgaacagaaacaagtcattgataagcgctatgcttttcttactacccatttaatgacaggcatgtttaatcaaaagctaaatggctatacaaccgtcacaggaaagcctatttctaaatatgtatctcgtccttacgcgggaaaatccggcacaacctctacggacagctggatgattggctactctccccagctcgtttcaggcgtttgggttggatatgatcaaggaagaacaatggatgatgtagctgaaaaaggatacgcaaaaaaaatgtgggcattatttatggaagaggccttaaaagggaagaaaaaagaaaagtttaaagcaccaagcggattaatgagcgtaaacattaatcctcaaaatggaaagttagcatccaaatcatgccctgttcaatataaagcttattatttaactggaacacagccaaaaacatattgtactgatcacatcgatcatgcagcaaaaacgaagaaaaaacagcatgaagcagagaataaaaagtttcattggctaccaaaatggtttgattaaaaaaagcttaaggccaaggccttaagctttttttagcattacgatgtttgaagcgcttcttttaagtcatcattagataatgtccaaatttcttcattatgagacttcaaaaactcgcgaagcaaagccttagacttgttatccatctcttctaccataatgcgtcgttttaaagatttatccattttgttcacatgttcaggaagtgatttatagccgcggcgaatttcacgatcaacggtcatttcacatgctgtcatacctgcgtagtaaggtccttcttgcttacgatcaatcgttacccatacaagccaatataacttgccatttggcacctcgtctttattcggtaagaacttaattcctttttctactacacttcttgcatgcatcgcaccgatatccacaaatacttcttcgtcgctcggacaaacaaaaacgggtgaaatgttttctaaacttaacgctccaactccgtagccaccgtggccgtcggttgaatcgtcttttatgatattaaatcctatacttttcttttttggctgagtcatagtaagcctcctctattcattaaatcagtggtgctaatatctgctgaaagatattcataacaaacgttgctgctccgtttagaagcggccagatcacaattcgatccagaggtgtaatcacaagaatcaaaaatacaaaaataccccaagactcatactgcgtcattttagctcgcgtagacggcggaacgaggtcttcaatcacgcggtagccgtctaaaggcggaaaaggcaacaagttaaatacacctagtgttaggtttatttgaataaataatgtaacaaaacgataaagcgcatcgttgtccactgcggcattattcatcaaatagtaaataagcaagccgataaatgccaacaccaagttgctaaacggtcccgctatcgatactagaataccagctaaacgaggctttttaaagaaatagcgattaacaggaaccggcttcgcccacccaaaacctgcgataattaacaaaagcgttccaaatggatctaaatgagccagcggagaaagcgttagccttccttgctttttagccgtgtggtctccaaataaataagctacatacgcatgtgcaaactcatgcagtgtgaatgcaacaataagggtcatcaccacgtaaggaaggtcttgcaatgaaaaagctaaaaaatgttccactctttatctcctttattttaaaataatttttacacatcatatctactagataaaacgtttgcttacgctaaaaaggatacaaggcttcttgaatatggcctcaaaggtctcaaaaaccagacatgggctccctttggccacacttggttttctgcatcgatgttatgataaaagtatactacagattatgacctgcatcactacctcatactgtcattttattcagaaaacgggtacactaatcatatactgaccaaaaaggagtgtacacattatgccagttgtaactgttaagatgcttgaggggcgtacagatgatcaaaaaagagctcttgttgaaaaagtaaccgatgctgttgtagaaacaacaggtgcatcacctgaaaaagtatccattatcatcgaagaaatgtctaaaaaccattacgctgtagcgggcaagcgcatgagcgatcaataacgcctacataaaaaagatgccataggagttgacctatggcatctttttaatgcacagacagagttgcctgaagtttttcaatatattcgtatgcttctgcaatgtcttcttctgtataattttgcttacgctttaacgtaaacactttttcttttacttcttctttaggtaaattatcaaaatataaaatcgtagagacgagctccaaaaatttagagctttgttcgttcatatccttcatacattcctgcaagtgtggaagctctaagtcatagtgacttaaaaatccttctcccgcttctgttaatacgtagcgatactgcatatacccgccttttttctctttaatttcacttaaaaagcctaagttacacagctcttcaattcgaagcgttaattcctcagaataaggtccaaaaaagtgaaaattatacttttcataaaaaggaaacttcagtttttttccgataaatatcatcttttgtaacttttttctgccaacaacttctcccgccgcggaaaatactttcacaatctttgcgtgatcgtttaacacagccccttcaactcctatactatttaactctgatctccttttagtaagtttataatctgatctttaacttttcgcttagacgacaattgatcaatgagatcttgtggaaaatataatttatgatcggttctctttttccctgaaattgcttcaacaatctccgactgacgtgataattcacgcacttcattatttggcatcaacagatgaatcggcaaacgttcttcctcttcacccggtcgataaaaatcgtatggtaagtcgctcgaagaatcgacgactaaataataatctgggttaatacccgcttttttaaataatgttgtaagctccatccacatcttcatttgtgaattcggattaaactcaatgtatttaaaaagctgacgattcataaatcttcggcatagatcagataaaatttcatcctcttcttcttcccacgcttgaaaataaaataaaataacagattcatctaatttcaaatactcttttagcgatatttcttcttcaaaaatcgaataaaaatgagttggctcctgcttgaactcatagtaatgatgatggagctcttttgcacgatgtaaaatttttgtcaaaatcacttcagcacttctcgtaacaggatgaaaatacacttgccagtacatttgatagcggctcataatataatcttcaaccgcatgcataccgctgtgtttaatcacggcttggtcttcccgaggacgcataacacgaagaattcgttccatatcaaagtgaccgtagcttactcctgtgtaatacgcatcacgctgcaaataatccatgcgatctgcatcaatttgactggaaattaaactaacgacaagcttattttcatatgttttcgcgattacttcggccacttttttaggaaaatcctttcctactttcgtcaacacttgatttacctctgtgtcacctacgataatggcttgggtaaactcttcatgatctaagtggaaaaccttctcaaacgaatgtgaaaacggaccgtgacctaaatcgtgcagtaaagcagcacaaagacaaagaagacgctcatcttcattccattcagggcgtccttgaaagccgtcatcaataatacggcgcacaatttcataaacacctaaggaatgactaaaacggctgtgctcagccccatgaaacgttaagtatgtcgttcctagctgtctaatacgacgcagcctttgaaattcggctgtcccaattagctcccaaataacacgatctcttacatggatatagcggtgaacaggatctttaaatactttttcttcactgagtttttcattaggatatgtcatttacatacctctctatcttcactttgttgttgctataatttttcgacactcacttcctattttcctattcagaataaaaaatcaccttgtcaagcaaccaaggtgatttacctaacaaacaaggcgattctgtttgtaagaagctcgttcgacaaataagtagcagaaaagcagctatttattgtttcactatctatttttttacttttttctcaatcttctcgattagttcatcctctgttggcgctgctacaggacggttatttacaaatgcaaatgactttttacgtccgggcccgcagtaagactggcagccgatttgtacttcagcttgttcatctatttttttaagtcgaggtaacaacgttttgacgtttgttgcctgacaatcatcacaaattctaaattcatttgccatgttgacacaatcctttcaaaattggttcatccttttgtctaaggggtattttacccctatttgaagtccgatgcaagttaaagaaagaagcaaaatctatcatactcctagaagaaatggtataaagtatggattttttgtacatgatgatactacaaaacatgattactatgagtcatggaaaatagaggagtgaacaaagtgaaagatagacaagatgcttggacagaagaaaacgacttattattagctgaaacagtattgcgccatgtccgcgaaggaagtacgcagctgaatgcgtttgaagaagttggagatgaattaaatcgaacgtcagcagcatgtggattcagatggaatgctgtggtacgccatcagtatgaaaaagctctgcagctagctaaaaaacagcgaaaacagcgcatgcgtgcacttggacaagagcaaggcaaaaagaaattattatatacgccaccagcatctgtagagcatgtggaacaaatgatgtctgcacctacagcaacatatagcttatctgaaacacaagtagaaaaaagcagcagtgaagagctttcaatggctgacgttattcgctttttgcaaacaatgccaaatcaagcgagcaatttacaggcattgcaaagcgaaaacaaacgcttgatgcaagaaaatgcagagttagctaagaaaaacacagagttggaaaaacaaatcaaacatctcgaagctaatgctactactattcaagaagactatgaaacattaatgcaaatcatgaaccgtgcgcggaagttagctctatttgatgaagaagaacgttcttctactacgtttaaaatggatcgtaacggaaatcttgagaaaatggctgaataagctatacgaacgaagaaagagagatgccaaacttggctcttctttcttctttttctattttacagacaatgatatgacgcctttatgctataatatgttcgtttactgtttataaaggggtttgagatatgcagcagaatagtttaaaacttttagcacagcccgcttggcgtattattgatcaatccagtctaggtcctcattttgatgcccgtcattcttttgccatcgatgacacgctttgtacaaccgttggaaaaggtgaatctccagctgtcatgcgctcatgggttcatcacgatacgattgtattaggcattcaagatacaaagctccctcacctagctgaaggtgcagcttatttacatgaacaagggtataaaacaatcgtccgcaattcaggcggcctcgctgtcgtacttgatcaggatgttctaaacatttctttaatttttccagatgccgaaaaaggaattgatattgatcgtggctatgaagccatgtttgatttgattaagatcatgtttgcatcttacggtaccgcaattgaagcgaaggaaatcgtaggctcctattgccctggcagctttgatttaagcattcgtaatcaaaagtttgcaggcatttcacagcgacgcgttcgcggcggagtggctgtacaaatttacttatgcgttaacggaagcggctctaaacgcgcttctctcattcgagagttttacaaaaaaggtctccaaaacacggaaactaaattttcatacccagatatccagccccatacaatggcttctctatctgagctattacagattgatttaaccgtttctgatgtcatgctgcttttattgcaaacactaaatagcatgagctcttctcttgtaaatatgcctttaaatgctaccgaacaagagctgtttgagacgcagctgcagcgcatgtatgaccgcaacgaaaaagcattgggttcattagccgaataaaaaaactccgccctaggacggagttttttttattaaagtgcttgagctgctgtgattaaagcaagcttgtacacatcttcttcgttacaaccgcgagatagatcgtttaccggtttgtttagaccttgtaagattggacctactgcttcgaagtttcctaagcgctgtgcaattttgtaaccaatgttacctgcttcaaggcttgggaatacaaatacatttgcatctcctttgatcactgaacctggtgctttcttttcagctacagaaggaacaaatgctgcatcgaattggaattcgccgtctaatgttacacttggtgctaattcttttgcaatttctactgcgtttgctaccttttctgtttccggagattttgctgatccttttgttgagaagcttagcatagcaacacgaggatcgatatcgaacatttcagctgtacgagcactttcgatagcaatttcagctaaatcttggctgtcaggtgaaatattgattgcacagtcagcaaatacgtatttttggtcgccgcgaaccatgataaatacgccagatgttttcttaacaccttgtcttgttttgataatttgtagagcaggtcgcactgtatctgctgtagaatgagcagctccgcttacaagaccgtcagctttgttcatgtgaacaagcattgtgccaaaataattttcatctaataaaattttgcgagcatcttcttctgttgccttgcctttacgacgctcaacaaatgctgcaaccatttcatcaaattcagagtagctttgaggatccaaaacctcaacaccgtctaattttacgtttagttctgctgcttttgatgctacagcgtctttatttccaacaacgataggctttaagatattgtcggcaactaaacgagaaacagcacctaatacgcgctcatctaatccctctgggaatacgattgatacatcgctagctgatactttttgttttaaacctgtaaataaatcactcaaagtaaatcctcctcgatatgtaaaaaacttttctcataataggatactccactttttttaaaaatcaaaggcatgtccttcaagaatccatgattacaaaaaagtcttttaattcttaattttccgctatcacctaaaataaaacctgtttttactttgtgacaattgtttaaagtttagtcacaaaatcacaggtttttcattccagatcttcggacaaactatgatatagtagaattggaatttatcataatcggacaataggagtgaaacgaaatggcagaagcagcacaaacattagacggttggtatgcacttcatgatttccgttcaatcgattggggcgcttggaagcagttatcaagcgatgatcgtcaagcggctatccatgaatttttaggattgattgagaaatggaaaggaactgaagctgagcagcaaggcagtcatgctttatatactgttgtcggtcaaaaagcagattttatgctaatgcttgttcgtcctactatggaagaactaaatgaaattgaaacagaatttaataaaacaaagcttgctgagtttaccattcctacttattcatatgtatcagtagttgaattaagcaactacttacctgccggtgaggatccttatgaaaatcctcaaatccaagctagactatatccaactttaccaaaagctagtcatgtttgcttttatccaatggataaacgtcgtcaaggaaatgacaattggtacatgcttcctatggaagaacgacgcagcttaatgcgcagtcatggaatgattggacgtcaatacgctggaaaagtaaagcaaatcatcacgggttctgttggttttgatgattacgagtggggcgttactctttttgcagatgacgtacttcaatttaaaaaattagtatacgaaatgcgttttgacgaagtaagtgctcgctacggggaatttggaagcttctttgtcggaaatttattaaaagaagaagctattgcacgctttttacacgtttaaactaagccggaaaagcgttcatctcttttgtaacgcctagagcaatgaacatcaatgagcttcacctgtaaaaaacctgtttccacttggaaacaggttttttattttctagccatggcatattcgcactgacaggaccatatatatacaacagtgtcacaagtaagcgaggtgggataatggcagtcgttgcacacaacgaagaagatgttaagctcctagccagactcattcgagctgaagctgaaagtgaaggaaaacaagggatgttactggtaggaaatgtaggcgtgaaccgcgctaaagctccctgtttggattttagaaatataagaaccattcgtcagatggtgtttcaaaacccaggcggatttgaagcaactcaaaaaggctacttttaccagcgtgcccgccagtctgaaattacacttgcacgacgtgtattaagaggagaacgttttaaccccgcggaaaactcactgtggtttttcaagcccagcggcgactgtcctgctcaatggtataaccaaaataacacaggacgatttaaatctcactgtttctttgcaccaactcaagctgattgtccaggagtttactaatttctttttgtttgaaggaggttcctatgaaaaaaccaaagtctaatcaaccgcaacagcaatatatgcaaaatccgtatatgagtccaaactacccttattatatgcctcagccgcagcagccccaaccaggaggccagcaggttcaagggcaaagccaaggaggttcgccccctacctcttctggaggcagtggtgcaccccaagacccaaatcaactgcccattgaagaatcatatattgaaaatattttacgtttaaatcgagggaaaatagcgactgtatatatgacgtttgaaaataatacgcagtggaacgcgaaggtctttagaggagaaattgaagcagccggacgcgatcatatcattttaagtgatccgcaaactggcacccgttatttactgcttatggtttatctcgattacattacttttgagggtccaatcaaatataattatccgtttagcggtggaggccagcagttgagcaattattctccgcgttaaaaaaaccccttttcaggggtttttttatagccattttacagctgcaacaacaattaaaatccaagccacaataaacgctactccacctagcggagtaattgcgccgagaactttaatgccggacgtacttaatacataaagactgcctgaaaacagcacaatccctgcgaacataatccagcccgaagctgttaacaaagaagactgaggaaatttgtttaatagaaacgcaatgacaaacagccccattgcatggaacatctggtactgcactcctgttttccatacctctaaatacttctctgagattttcccttctaacccgtgtgctccaaaagcaccaagagcaaccgctaacatcgcattgattgcaccgattattaaaaatagtttcatttttttctcctcactttagaaatcaaacaaactatcgccgtttgcatcatctgatttcaatttcgttccctcaaaattaggtttggatgactgaataatctgttgctgcataatctcaggcgattgcataatttccggtgaagacattaccacaggttttgaaaccgagacaggtttcgatactggaacctcttcattttgatctaatgcaagctcacacagtgcttttatggcaaccaattgatctcgaacgttcgcactattcgaatggtgctttgctttttgtacttctgcactaattttgtcaaggagctgcgtcatttttatatccatgtagacacctcatcttacattcaatatgactttatacagctattttatcaaaagatgaaataggaggctatgtctgaagctaatcttcatgaaatgctcacttttacacatcatcaatttgccaatcaatagattgacgtccgtgttggagcaaaaactcatttgctcgttgaaagtgattattgccaaaaaagcctcgattagccgaaaatgggctagggtgagggctttccaaaattaaatggtgcgaatgatgaataagctcttttttagcttgtgcatgcttgccccacagcaaaaacacgacgggctcctctttttgtgccactaattcaataatgcggtcggtcagctgttcccatccttttcctttgtgagaattcgcttctccttttctaactgttaaaacagtgttaagcaaaagaacaccttgttctgcccatttgactaaataaccgttattcggaatgtgataatccatttcatttttcagctctttgtaaatattcactaaagaaggcggtgtttttactcctggttgaacagagaagctcagtccatgcgcttgatttggtccatgataaggatcttgtcccaatatgacaacttttacatttttataatccgtatagtgtaaagcgttaaaaatatcatatttatcagggtaaatagtgtggtgattatattcatccactaagaattctcgaagctgtatgtaatagtctttttgaaattcttcttctaataaaggagcccagtcattttttaaaatactcattgcttatcacctcataataatcttttttgttattttatcgtaaactctgccccctgctcaaacgttgcctgctttaaatatactgagagcctgggcatattttaatattgtcatgttcaatgaaactttgtatacacttataaagagtgtatttttatattaaaggagggattccatatgatcattagcaatccccaccaaatagacgtaacctacagcctgggtgttacacccgttgaaccgatgataccaagaaaatacaccgttttcccaggtcaacacacttctgttccttccattcaaatcggcattgaatttgcctacgatcatatgcaaaaagagcggaacgaatatttagcatccttcgtcttcgataaaggtttttattcccttactgtgtattattacatcggtgcgcatacatcaacagatgaaaccattacacgctaccttcactttttagaacagctccctgtcattctatcgtccatctatcacgctgatgcttcttttttcgaaaaacatccacttttaatgcactgtcctatttttatcattgccgatagccctaagctgccattttcaacaaaaaaatctatcggttccctgtatcaatataaataaatgagaaaagctactgttaaaataacggtagctttttctccgtattcgaaacaaaatacttttaaacttgttaaaaacatggaataataactacaaattgttttaatctatttgcgttaaccctttaaaatcgttacaatttattagtagttctatacataaaggaaaaggtaaacaagcaatcattcgtttgtttataaaggccgggtttaacgggcaatgaatccccagatttcatttaagtgttgtctgttaaagcggaaaaaaattgaacgtaactacgacaaagtgaggtcctagaagtaatgacaaatgtacaaccaaaatccattatcgtaatttttggcgctacaggtgatttagcaaaacgtaagttattcccctctattttccgcttatataaagcgaacaaactatcggaagatttcgctgttgttggtgtcgcaagaagaccttggactaatgacgaattacgcgaaaatgtaaaaaaatcagtgagcagtttcaaaaacagtgacgctgacattgaaaagtttgcttcacatttttattaccaaccgtttgacgtaacagatgtcgcttcttatcaagaattaaaaagcctaacagaaagccttgatgagcaatacaacgtgcctggaaatcgtattttctatctagcaatggcacctgaattcttcggaacaattgcttcgaatttaaaaaatgaaggtttaacacaaacagaaggctggagtcgcctagtcattgaaaagccgtttggtcatgattatccttctgctaaagaattaaatgaacaaattcgccatgcatttaaggaagatcaaatttatcgtatcgaccactacctcggtaaagaaatggtgcaaaatatcgaagttatccgttttgcaaatgctctatttgaaccgatgtggaacaatcaatacatttcaaacatccaaattacgtctagcgagacgcttggtgtagaagaccgtggccgttactatgaatcttcaggtgcccttcgagatatggtgcaaaaccatatgcttcaaatggtggcattgcttgcaatggagccgccgattaaattaacaccggaagaaattcgcagtgaaaaagtaaaagtactgcgtgctcttcgctctttatcagtggatgaagtagatgattattttgtacgaggccaatacggcaaaggtgtacttgaaggagaagaagttatcggctaccgcgaaggaaattcggttgatcctgagtctaataccgctacgtttgtatctggtaagcttatgattgataacttcagatgggctggtgtaccgatttatatccgtacaggtaaacgcatgaaagaaaaagcaacgacaattgttgtacagttcaaagacttaccaatgaacctgtacttcaataaagataaagaaattcatccaaacttgcttgtcattcatatccaaccggaagaaggcattacgcttcacttaaacgcgcgtaaaacgccaggtgccacatcatccacaccgattaacttgaactattgcaataactgtggagataaaatgaatacaccggaagcttatgagcgccttatttatgattgcatgcttggagatgcgacgaactttactcattgggatgaagtagccctttcttggaaatttgttgataccatttcagaagcatgggaaagcacaaaagcacaaaacttcccgaactacgaatcaggttccatgggaccaaaagaatcagacgcattacttgctgaagacggtttccactggtggccagtcggagaagacaacttctcacctaaagagtaaataaaaaaagcagctgtagtatacagctgcttttcttgttttttattttaaccactcagtatggaatacgccctctttatcaacacgttgatatgtgtgagctccgaagtagtcacgttgcgcttgtaaaaggttcgccggtaacgtttctgtacggtagctgtcatagtaagctaatgcacttgagaaacttggtacaggaataccttgtttaacggcaattgaaataacttcacgaagagcggactgatagccttctacgatatccttgaagtatgggtctaataataagtttgttagatctgcatcgcgatcataagcttctttaattttttgtaagaattgtgcacggatgatacaaccaccacggaagatcattgcaatatcaccgtactgtaaattccagtcatattcttcagaagctgctttcatttgagcaaacccttgcgcatatgaacaaattttactcatgtacaatgctttacggattgcttctattaattcggttttatcaccttcaaatgcagctgcatttggaccgctcaatactttgcttgcttttacacgttcttctttcatagctgaaataaagcgcgcaaatacagattccgtaatgattggtagtggtacacctaaatcaagcgcactttggcttgtccatttacctgtacccttttgacctgcagtgtctaaaataacgtctacaagtgctttacctgtttcttcatcttttttcgtaaagatatcagctgtgatttcaattaagtagctatctagctcgcctttattccattcagcaaatacttcatgtagttcatctgtttctaaacctaatacgtttttcataatgaagtatgcttcacaaattaactgcatatcgccgtactcgatgccgttatgaaccatttttacgtagtgacctgcaccatttggtccaatgtatgtgcagcaatcatcgccttcaactttcgctgaaatagctgttaagattggttttacaagttcatatgcttctttttgtccgccaggcatgattgaaggtccttttaatgcgccttcttctccgccagatacgcctgtaccgatgaaatggatacctaattcttctagctctttgttacgacgaattgtatcctggaagaatgtatttccgccatcgattaaaatgtcgcctttttctaagtatggttttaacgaatcaattgttgcatctgtagcagcaccagctttaaccattaataaaattttacgcggtttttcaagagaattaataaactcttccacactgtatgtacctgcaaaatttttaccttctgcttctgtttttaggaactcttctgtcttttcaggagagcggttataaactgaaacagaatagcctctgctctcaatgtttagcgccaagtttttccccataaccgctaaaccgataacaccgatttgttgttttgccatgttaaattcttcccttcatgtgtaatatgaattggtcaacctaatcgtaactgaacatatcataaagaaagttacagattcaagtttgatataaccataatcatacgttttattatacacatttgaaaagaatcatgctcaccgaacattgattattttgaagaaaatttcgataaaataagcgaaatgaacgcagttactaatcatccgtacattcttaactacctttagacgcattttaacattttcttaaacaattacttttgttaaaatattaagcagttaatcatttcaatgaattgatgatcaacacggttgttaccgttttactatatttattgtagctaaaaagctgtactagtacttattttgttttatgaagagggattttatatatgacgaaaccaatcaaagatccgttcaaggaaaattttgatacgcttgaagaattcgctgatcgcattagcgaagtattgaactgtcctattaccattgaagatgctaatcatcgcttattagcttatagcacccatgacgaaagaacggaccaggcgcgtattgccacgattattggaagaagagttccggaaaaggtcatcaacaacttatggaaagaaggcattattcctaaactgcttgagacaaatgaacctgtgcgtgtgaaaaatataaatgaaattgggcttggagatcgtatagctatttccatctggaaaaatgaggaagttctaggattcatctgggctgttgaaattgagaaagccttaggcgacgaagaagtagagctattaaaaaaagctgcgaatgtattaaaaaataaattgctacagcttcaaattcgaaagtataaacgagaggaacgttcacaggaatttttctggaaactattaactggtcacattaagtctcgccaagaaatttcagaagcgttttatgaagcgcaaattacagctccatcaacgttttccattgctatcttccgcttccaagaggatattacgcctgaagctgaacgtcaaatctcgtatatgctaaaaacgatgcatcgcttaaaaatcgttctttatacgattgattgcaatgacttaatcttactgctttctttggatgcggttgaaaaccctctcgatgaacagcgagattttgtagactattttagaggcaatatgtatgaacgctttgatgttactcaaattaaagccagctgcagcagtatttattcatcgcacgatcatatcgaaaaaagctataaagaagccttgaacgtattagatatgaaaagcaagtttccagaagaaacgaaagagattattaactatcaggaattaggtatttatcaatttcttgatgttattttagagaagcgcgcgcacgatcaatttgaaaatcattctttaaagaagctaactgattacgatcttcgtcataatagcaacttggtggagactctcgaagtatttttaaataatgataataacattaacgaagcagcaaaagaattaaatgtgcatatgaatacacttagctatcgattaaagcgaatttcagagattggtgatattaacttaaaggacgttaatcaaaaaataactctttatattgatattaagttaatgaaatataaaaaataacagatgatgtgactttttttaacactgagctattcatttatttcccaataaacgaatagctctttttttcactttttatttctttgtgatgttagattaccttacacaaaaattaaaaattctgataagtaagcggttacatttgtgtgtttaaacaaaaaccacttattcaattcttctttctagacaaagaaatttcataaaactttctttatactaaagatacacaaacgaccaagggggaaattaatcatgattattggcgtaccaaaagaaatcaaaaacaacgaaaaccgagtagcgattacaccagcaggcgtagcatcatttgttggtacaggtcatcgtgtattaattgaaaatgaagcgggtattggaagtaacttcacaaacgaagattatgtaaaggctggagctgaaattgttgagacagcagctgacgtttgggcacaagctgaaatggttatgaaagtaaaagaaccactagcaagtgaatacggctattttagaccaggtcttattttattcacataccttcacttagcagctgaaccagcactagcaaaagcattaaaagatagcggcgtaacagccattgcttatgaaacagtagcagtaaatcgtacattgcctctattaacgcctatgagcgaagtagcaggacgtatggctgctcaaatcggtgcacaattccttcaaaaatcaaacggtggaaaaggaattttactagcgggtgttcctggagttagccgcggaaaagtaacgattatcggaggcggcggtgttggtacaaatgctgcaaaaatcgcaatcggtctcggtgctgatgtaacaattattgatttaagtcctgaacgcttacgtcaattagacgatatctttggcaaccaaatcaatacgctagtgtcaaacccttataatattgcggatgcagtagcggagtcagatttagtgattggcgcagtattaatcccaggtgcaaaagctccaaaactagtaacagaagaaatggtgaaaacaatgaagccaggttctgttattgttgacgtagcaatcgaccaaggtggtatcgttgaaacaatcgaccacattacaacacacgatcagccgacttatgaaaagcacggcgttgtacactatgcagttgcaaacatgccgggagcagttcctcgcacatcaacaattgctttaacaaacgtaaccgtaccttacgcacttcaaattgcttctaaaggtgttcacaaagcaatcgctcaaaacgaagcgttaaaattaggagtgaacgttgcaaacggagccattacgtacgaagcagttgcacatgatttaggttatgattatgtatcagtagacgtagctcttgaaaaagaattagcttctatctaataaatagtgaaaaacgtccttaacccgctgttaagggcgtttttattttgcatgaacaacaattagctataaaaaacacgactatttaaagctttgtgtatctgttcactggtaatctccggtactattggccagaattcaggagtaggaaacataaggttactaggcgttctattatgatttccatctagttcatgaaaaggttctggatcatccgtctcgttaaaccgattcgtaataaacataaaatgacccaattcatgtgcgagaagatactcatctgtacttgcatttgtcataataataagcggaaaagaattataagttacagcgagagtagatgaataatcaaaattaacaggcccaaatctatttccattcatgtaaaatacatacacatcagcattttgacaaacttttcggccagttttaagcattgcttgtaccattgtaagatgactagcccctccaattggaaaattttccgcattactaacaatgccactgatgttttccaaaaaaacaactgaacgtgtaatagtaaatgtaacaccttggattaatcggtttttctcgtattgtttccatattttattagcagcggctatgtctctttttacacgattgggaactatagactgattatctgtagagtttcgatcaactttagctcctggtaatacaattatacaaacatttaaagtgcctgccttaacagttctgaagtgatcatttgttaaatttgaattcatataataatctttgtggttttttttgcgaggttgtgatttattgaaagcatacgaatcgtctttataactgtcatgattagaatgtttttttatgtgaatcaccctttcttaagtttctatttattttattcattaagaaaaagagtgcttgtaccataaggtaaaaagccttttaataagaggttttttagcatacgattacttctgaaggtggctacccttaagtttatgcaaagtaaatgttcaagccacattacatttcattcgttaactttcatttaactcatgcttcacagtcagtcataataattctaaattacacttaggattcatacagtttttagaaattgaatatctacattaaaagcgataaaataaaagaaaaagtgaaaagtgaatggaagaaatttatctaaaacacattgggtagctaaaaaccgactggtggaagttttactctattttctctatgaacttaaaatacgggaggattttttatgacaatgaataaagcattaaccattgcaggttctgacagcagcggcggagctggcattcaagcggatttaaaaacattccaagaactgggtgtttacggaatgacagctttaacaacaattgtaacaatggatcccgataacagctggtctcataacgtatttccgcaagaagtttcaactgttgaacagcagttgaaaacaattgtaaaaggcgtaggcgtacaagctctaaaaacaggtatgcttggctcagtggaaattattgaactagccgcaaaaacaattgaagaatatggtttaaaaaatgtcgtagtagatcctgtgatggtatgtaaaggagaagacgaagcgcttcacccggaaacaactgtcagcttgcgtgatgtactagttccaaaagcaacagttgtaacccctaatttatttgaagctagtcaattaagcggacttggtcctatcaaaacggtcgataaaatgaaagaagcagccgtcaagatttttgaccttggtgccgaatatgtattgattaaaggcggaagtaaattggaacatgaaaaagcaattgatttgctttatgatggaaaaacgtttgagatcttagagtctgaacgtattgagacaacatttacgcacggtgctggatgcacatactcagctgcgattgctgctgaattggcaaaaggcagtgacgtcaaacaagctatttatacagcaaaagaatttattacagaagcaattcgtcattcatttgctttaaatcaatatgttggaccgacaaatcacggtgcataccgtcgtaacaaggagaaagtaacaaactaaaaagcatgcctaaaggcatgctttttagtttgcttattgtttaactgtttcaagcgcatttaaaatagcttgagctacgccgtgctcgtcatttgttcctgttacgatatgggcaaactctttaatttcttgaggggcattccccatcgctacagcacgtccaactcgctgaaacatcgatacgtcgttataattgtctccaatggccatcgtttcttctaaagaaatatggcgttcttgaacaaatgatgtaaccgcaattcctttttgagcattttcatcatttatttcaatattttctttaccagatgcactgactgcaatcgaatctaacttcacaagttctatttttgcctgttctaacttttcttcgtcaaaagagaaagcaagcagcttataaatgtccttgtttggatcttgaaataacgcttcatactcttcaataagctttactctgccgctattgaaacgctcttttgccgcttctaacgatttttcataattatcttttaagctagcgcttaaataaatatccattaataccgacaaagctttttcatagtcatttgaatacgtgccttcacttgtatagacttcaaagtacaactgaaacttcttaaaaacaccctctacttcgcgaatagattccatcgtcatgcctactgaatattgtttttctccttgtggattccgaagctctgctccgtttgcacaaattaaatatgtatgaagtcctgcttcttctaaaacataacgggcctcttcataagaacgtcccgtagcaacaacaacttccacccctgccttttgagctgtcttaatcgcttgggcattttctttacttacaacttgttcactatttactaaagttccatccatatcgatcgcaatacatttaatcatgatgtaccccttcctatgtatctttgctctcttattttattctagcatatgtttttttgcgctttgctacttgcatgtaaaagatttactaattttttgtatacatgctgttataatctgttccttttcttgctttttcgaaaacctctttgatcgtctttaaacacaaatcagctgttgaatatacgtgaaaattcatatcctcttccttcagatgcttaccaacgccgatagaaaccatatctgtttgattaatagcttttacacccgcctctccatcttctatggccacacatgcatagggtgttacttttaattgatcagcagctgtcaaaaatatttctgggtctggttttcccttctttatttttctcacatccacaatgcaatcaaaaaaaggacgtattcctaacgcatccactacagtatttgcatttgaactagaagaagcaatcgccattttaataccttgttttttacaatcctctaacaacaattgtattcctggaagtagatgatcctttgtcatctcctttattaatgcttgataatgcttattcttttcatcagcaagctgttcttttttttccactgtcagatgtacattgccttgggcagcaatgagctctacagttttcactcggctgatcccctgcagctgctgattgagttcttcagaaaatgaaacgttaagttgatctgctacttttttatttgctttataatataaatgtaccgtatctgcaataacaccgtctaaatcaaaaataatcgcttgtagctcttcttttttcatattatcctcctctgtacttgtctttatgccattatttgaatgcttttattacattccatcatgttaaaataccgttgatattgttcactttatcataaaaattttttcatcatttatgattcatgaataaatttttcaaaaaaagagaaattacagtattgcattatgaaagcccttttattacaataaggttatgcaaacggttgcactattttgaaatatagtttatcaaaaaataaaatgaaaacccatacataggggaaggggaaaaactatgaagaagttcttttcatttgatttttggcagaaatttggtaaggctttattagtagtagtagcggttatgcccgcagctggtattatgatttcacttggaaaactagttgcaatgactgggggagacatcactgctgtacaaacaattgcacgcgtgatggaagacataggctggggtatcattacaaatcttcacattttgttcgctgttgccatcgggggctcttgggcaaaagaacgtgctggaggtgcatttgctgcactcatcgcattcattcttattaatcgaattacaggagccattttcggagttaaagcagaaatgctctcagattcaaaagcaacggttcaatcactgtttggacaagaattagttgtaaaagactacttcacatctattttaggatctcccgctcttaacatgggagtgttcgtaggaattatcgctggatttttaggtgcgaatttattcaataaatattacaactatgataaattgcctgaagccctttcgttttttaacggcaagcgcttcgtaccatttgtggtcatcggtggttcagttgtaacggcactgcttttatccattgtatggccgtttatccaaggttcattaaacagcttcggacagtggattgcaacatctagagacacagctcctattctagcaccatttattttcggagcattagagcgcctgcttcttccatttggtcttcatcatatgctgacagttcctatgaactacacggagctaggcggaacgtacaaaattttaacaggttctggagcaggttccactgttgccggtcaagatcctttgtggcttgcttggattgcagatttaaataatttccgcgctgcaggagatatggaaagctacaagcagttattacatgacgttacacctgcacgctttaaagtaggacagatgattttgtcttgtgcgtcgctaattggaatcgctttagcaatgtatcgtaacgtagatcctgacaaacgttcaaaatatcgttcaatgttcttttcagctggactagctgttttcttaacaggcgtaacagaaccaatcgaatttatgttcatgttcgcagcacctcttttatatgtcgtatatgcaattatgacgggactggcttttgccattgttgatattgttcatgttcgcgtacactcatttggcgtaattgagctattaacacgtacaccaatgattatcaaagccggcctatgggctgacttaatgaactttatcatcgcctgccttgtattctttggcttaaattttggagtggcaaacttcttaattaaacgttttaacttcccaacgccgggacgtaacggaaactatattgatgaagaaacaactgcaacaagcagcaagcaggtgaaaaatgattcgcttgcaccagtcattattggactgcttggcggagaaaacaatattgaagatgttgatgcttgtatgactcgcttacgtgtaacggtaaaagatatacatgccgttgcaggagaaagtgagtggaaacaaaacggagcccttggtttaatcttgaaagataaaggggtacaagctatttatggacctaaagcggatgttttgaaatccgacattcaagatttgttaggagcttaacacaatgaagctattaacgttaaattgccactcttggcaagaggaaaatcagctagacaagttatcttgtctagctgaagtaattaaaaaagaaaaatatgatgtcattgctttacaggaagtaagccaaaaagtagacgcaccttatgtatatgactacattcgcagcgataattacgcttggcttttagcaaaagaactgggtaagcaaggtgaagactatcaattggtatgggatttatctcatataggctatgaagtgtatgaagaaggaattgccattttaacgaaacacccgattattgaagagcattcattttttgtttcacaaacgtcaaatattgactattggaaaacgagaagaattgttggagcaacaatcgaatatgaaaaagaacttcttacgttttattcttgtcatcttggctggtgggatgacgaggaagagccgttcaagcagcaagttgatacgctgctagctcatgtacacaaagataatccatttttcctactcggagactttaataatgacgctcatagacgaaatgaaggttacgactacctgttgagccaaggcctctatgatacgtatactctatcgaacaaaaaagacagcggtattacagttaaaggtaacattgctggatgggatgataatgaacgggcactgcgccttgatctaattctatcgagtcatgcgcaggatattcagtcatcaactgtggtgtttaacggcatacattatcccgttgtttccgaccattttggggtaagcttatatttaaaatcttaataaattaaataacacaaaactttattaaaaagatataaatgtacgcaagggtcctaatagatacttacttacattcatatctttttttattgaatagaaaacaactagtaaaagtcaatataacagggaattactaatacagtaaccagtgtaattcatttatgttactaaaaattattaagatttaaaacagataaatgtaatattaaataggtactaaataataacnnnnnnnnnnnnnnnnnnnnnnnnnnnnnnnnnnnnnnnnnnnnnnnnnnnnnnnnnnnnnnnnnnnnnnnnnnnnnnnnnnnnnnnnnnnnnnnnnnnntaaaaatccttagaaaggaggtgatccagccgcaccttccgatacggctaccttgttacgacttcaccccaatcatctgtcccaccttaggcggctagctccttacggttactccaccgacttcgggtgttacaaactctcgtggtgtgacgggcggtgtgtacaaggcccgggaacgtattcaccgcggcatgctgatccgcgattactagcgattccagcttcatgtaggcgagttgcagcctacaatccgaactgagaatggttttatgggattggcttgacctcgcggtcttgcagccctttgtaccatccattgtagcacgtgtgtagcccaggtcataaggggcatgatgatttgacgtcatccccaccttcctccggtttgtcaccggcagtcaccttagagtgcccaactaaatgctggcaactaagatcaagggttgcgctcgttgcgggacttaacccaacatctcacgacacgagctgacgacaaccatgcaccacctgtcactctgtcccccgaaggggaacgctctatctctagagttgtcagaggatgtcaagacctggtaaggttcttcgcgttgcttcgaattaaaccacatgctccaccgcttgtgcgggcccccgtcaattcctttgagtttcagtcttgcgaccgtactccccaggcggagtgcttaatgcgttagctgcagcactaaagggcggaaaccctctaacacttagcactcatcgtttacggcgtggactaccagggtatctaatcctgtttgctccccacgctttcgcgcctcagcgtcagttacagaccaaaaagccgccttcgccactggtgttcctccacatctctacgcatttcaccgctacacgtggaattccgcttttctcttctgcactcaagttccccagtttccaatgaccctccacggttgagccgtgggctttcacatcagacttaagaaaccgcctgcgcgcgctttacgcccaataattccggataacgcttgccacctacgtattaccgcggctgctggcacgtagttagccgtggctttctggttaggtaccgtcaaggtacaagcagttactcttgtacttgttcttccctaacaacagagttttacgacccgaaagccttcatcactcacgcggcgttgctccgtcagactttcgtccattgcggaagattccctactgctgcctcccgtaggagtctgggccgtgtctcagtcccagtgtggccgatcaccctctcaggtcggctatgcatcgttgccttggtgagccgttacctcaccaactagctaatgcaccgcgggcccatctgtaagtgatagccgaaaccatctttcaatcatctcccatgaaggagaagatcctatccggtattagcttcggtttcccgaagttatcccagtcttacaggcaggttgcccacgtgttactcacccgtccgccgctaacgtcatagaagcaagcttctaatcagttcgctcgacttgcatgtattaggcacgccgccagcgttcatcctgagccaggatcaaactctccgaagaaatgtttgacttgctcaattnnnnnnnnnnnnnnnnnnnnnnnnnnnnnnnnnnnnnnnnnnnnnnnnnnnnnnnnnnnnnnnnnnnnnnnnnnnnnnnnnnnnnnnnnnnnnnnnnnnngaagtaagtatatttgattttttttttttttcaagcagaagacggcatacgagatttctgcctgtctcgtgggctcggaatgtgtataagagacagataacgaagaagataatataaaagatacagttagcaacgtaaagtatatgaacaattttgattatatagttgttaacgatggttcaaaagataaaacgcaagaaattctagattccaataatttcaatcatttagatcttcctataaacttaggaattggcggtgcaatgcaaactgggtataagtatgctctaaaaaatgactatgactacgctatccaattagatgcagatggtcaacataaccctaaagacttggcaaaactaatagatgaaattgatattaatcatttcgacatggtaattggatcacgttttattgaaaaaactgattatcgtggctctttaacaaggagagtaggtatttattatttctataaattaatacacatattaacaggaaaaaaagtaacagaccccacatctggatacagagttgtaaataaaaaaattattaaagagttttctaactattacccacaagactatccagaagttgaggttgttgtagacttagctaaaaaaggatacaacatccatgaaacacgtgtagatatgaactctcgtcaagggggaacttcatccattacaccactaaagtcaatttactacatgataaaagttacatttttctctgtgattagaaaagtgttttaggaggaattatgacacctgttcaaattatatctttagtcgtggcattaatattcttatttcaagtgttagtctatacaagtaaacataaattaaaagatcaagtagcttttttctggctgctgatttctttagcaggagttattatcgccatatctttgccgttttttaacgtattagtatccaaaatcggtatttattatatgccttctttattctttctgttggctttaattttgattttaaacattttgatttatcaaaatgtattaatttctaaacaacaagacaaaatcaaagatttaactcaagagatggctttattaaagcactcgattcaagagaaagaaaggaatttatagaactataatgaacatagcaaattttttattgattttagctaataccttgactcttgtgtgcggacaatttttatggaagtttggtttagaatcgaagtctcaaccatttaaatctttacattctatcattaatctatttctatctccatatgtcatttctgggttagccctatatggcttagctaccgtcttatggctttttattctaacgagagttcctttaagtgtggcataccctatacagagtatggcttacattctagcagtatttggagctttttttgtttttggtgaatctcttacactttataaggtattagggtgtttatttattatgataggcgtatcatttataggctttacctctacgaactaattctaattcataacctacacttttaggttatgaatttttttatattttttatgaatattctaaaaatctcttttagaaagctttatactttaaaattaaggtatgctataatatttggatgttaagaatgcatatgtaattatattaatttatgtaaagtaccatacgcataatatataaaatcagcaaattgttgggtgtgattaaacgtgaaagttttattaatttcaaatatgtatccttcaagagagtttcctagctatggtgtttttgtccaaaacactgagcaaatcttattgaataaccaatttcaggtggatcgtattgtactacaaaaaaagaaaacaaaacttcaaaaattatttggatatgcacttcattacactaaaattatttggagtgggctaacaaaaaaatatgattatatatatgtgcactatgctgcgcataatgcagctccgttacttctgctaaaaaaactaaatagtagggtcactattataacaaatgttcacggctccgatgttgttcccgaagtttcttcccaggagaaatttcaacctagagttaaacagttgttgaaggagtccgccaaaattattactccttctccttactatatgtcattagttaaagagaagtacgaggtaaaaactcctatatatatttttccaagtggtggagttaatcctgacgttttctatccttttttagatagaaacgaagcttttgaaatgttgaaactagatccaaatcaaaagtatattgggtgtgtaagtagaattgatgtgggaaaaggttgggaatattatttaaaagccattgctcaccttgaagaagctaccccaacattctataagtatttgtacattggtagtggaaaagatgaagacgcgtttcataatttagcagaagagttaggtattaaggaaaaaattattcattttccattacttcctcaaacttcattaaaatatgtttacaacgccatagatgcatttatttttccaactgttcgcgaaggagaaagtttaggtcttgttggacttgaagctatggcttgtggaacacctgtgattggcagcaaaattggaggattaaaagattatattatcgaaggtaaaaacggtttatttttccagcctggtaatgaaatagaattggctgaaaaattatggttctttatgagtagttctgaagagtacaaacaaagattgtcaagacaagcaattcttacagcacatgattacactattaatgttatctctgaaaaactacctcgtatttttaatgattaaagacattctaacaataggagaaaaaaatgaaaaccaacaaaagattactatttttcacaatcatcttagctctaatagctataggtttatttttaggtgatagtcaaagtggaaattacacttccatcttacttacaattatcttagctacctttgcttctatttatctttattcatataaagataagtttagattcaacattatagtttggataatgatgataattgttgcttttttaacacaatttgcttttttaaataacctacacattacagcatcgacattgtttttgtttatgatatatatacttagccgctttttatttgcgttcttattaacattaactgcagcggtatttataagggatttaaatgattttaactacattttggtaaaacccaccaagtatacatggttaataattttattggttttaggaattagtttattttactgggtagcttttttcccagctgctatgactcctgattcattatctcaatggaggcaagctcatacaggagaatttgatgatggtcatccaattattttcacatggcttattatgtttcttgtaaaaatttggaatagcccaggtataatagctctttttcaaatcttagtagttacaagtgtatatggttatgcttttgactttttacttaaacgtaaggttcaccctcttttcctaggaattttaacggctattatacttgttatcccgagtttcactattttctccataattatatggaaagatattatttacagttcctttttgctatttttcactgtaaatttagcgaaattacatttttctaaaggtaattggataaaaagtcgttctgggttcttactattacttttgtctgcttttggcactgcgttcttcagacataatggattgccagtttttattcttacttttgtcttactcattatactttttagaaataaatggaagcctttactttctatatttttaattgtttttattttagaacgaattatagctggaccagttttccacgctctaaatgttaaaccttcagatccaaatgaagctctatctatacctacacaacaaattgctaacattattgttaatgatggcgatatgacaaaagatgaaagagcttattttgataaggtatttcctattgaactgtggaaagaaaaatataatccttataatacaaatccaataaaattcacgtgggaatcttataaccgtgaattcatttttaaagataccggtttatattttaaaaattatataagcattgtcttaaaaaatcctttacttgcaactgaagctttcttaaaacaatcttctttagtctggcaagtaacaacatttaaagatggatacacggacacttatgttactaatgtttattatgggaatgaccttggtttaaagaatgaaatcatcagccaaaaaattacaaatacatccaataaatacttggctatatttaaacaacctgtattttcatttttatggaaaccagctttttatcactgtattattttattatctgggctatttcttgctatacgtaaaggtaaaaaatcactagttattatagtaccttggctattaaatactctatcgatacttgcaggtttaccagcacaagattttaggtacctcttagcaagtgtctttatatcaatatttttaattgctgtgccttttataaagccggatgaagaagaacactcattgtaaaaaataaatcgttacgtacttttaatctaatttggataatagtcggaaagttatttaatttttctttccggctatttatttacaataaaaataattttttattaatgacttttcttgttttgaaactagagtttattatttttattgtattttctaatttaaaggtaggagtttcgcatgaaaaacttaaaattcgcgagcattttactgctcatatcaacattatttttgaaattttctagtatgattcgtgatttagttattgctaactatttcggtacaagttatattgtcgattcatacaacgcagcaatgatcattccaaacgcttttattttatttatgttaacggggatgaaggatgcgtttattcctagttatttacgttatgaaaaagaaaataaaggaaaggttcatttgactaatattgttaaatcaacctttcttatttgtttcattatttcggttctcggatcaattgccgctttcttttactttcccgcttcgtattctaatttttccaaagcagcaattgaactaggaatttatacgggcgttatgtactttttatctctttcactagttggagtgaatgccgtatacgaaggtgtatttgatgcacgaagtcaatattctttctccgtgttttctcaaacggttgttgtactctttacgattttaagtacaatcctattacattcaatcatgggcggctatgcaattgctcttggatattttgtaggaacaattgcttctttcttaattaaagttgtctattttaaaccgcagcatctgctgttatggaagcaaaaaattgaccgtgatgaagtggtggctttttataaagtattcatccctgttggtgtgaccattatggtcggtcaaattaatttaactgtaaacttcttttttgccggctcctttggtgaaggtgttatttcatacttaaattacgccttcagacttgtaagtattccccaggcaatattcggggttacggtcgcaaccattatttatccgctgattgcaagagccatttctgaaaaagatgaagaacgctttaaatcgggaattgaaaaagggattacgtttatgctgatgctgctgattccgacgattgttattatgatcttttatatgaaagacattgtaatgattgcttatcagcgcggtgcatttgacgcaaattcgacgttaaaaacaacggatgtatcttattattacctaggttcggtgtttttttattcgctgcaagctgttcttgcaaaaggattttattctcttcaaaaaggttatcttattatgagagcaggcttattatccattgtgttaaacatcatctttaacatgattttcactaaatttatgggataccaaggattagcactttccatgtcagtggttgcctttttctatacggccatcgtattcgttatgctggcaaaacaaatcaatcacttccattacggatatctagtgaaagaaacaggaaaaattcttttagcttccgtacctgttgctatcctcatgttcttcttgaaggacatcgcatttttgaattcattacatgttatcttacgatttggtattgtctgtcttgcaggtggtttagtatacttaatgtcgacgctattatgcagagtagaaggtgttatgcttttagttaaaagaaaacgttaattcacgtaaaacaggagagtactatatgaagaacacatactggttattttttctgttcgttggttttatttcaattcagccaattattgatatgctaacgacgtacatggttttgaacatggatagtggtctctcaattggggttgttattcgctttctatatatgatttttgcaggtgtcctacttttagtgtttgccaaacaatcaaaatgggctagatattcgattatctaccttattgtttttgcactctttcttggactcaatatctacttaaatcatcaatggaaagatccttattatattgggcaagaaattaaatttttcaataaggttgtttatttgaacgttacattactcggaatgattgtgatgttttcacattatcgatcgtctttggatgtaaaaagaatactgagcaaaaacttattgactgcttcactcatcatcagtattgtttttatcggtacaatgctaacaggtacagcactagagagttatcagtataataaaatcggatttaaaggctggttttatgcagcgaatgagctaggggcaaccattgctattttgcttcctctcacactgcttttagctttagataaagtacgttcgttttcaaaagcttattactggattccttttatcttgttagctgtttcgtccatcatgcttggaacgaaagtaggcttaggtgccgttattctttctttagttgtagcgacagttgtcttatttgcaaaattatttacgaataaacgcagcttaattaaagccaacttagtaatctcaattctgcttttaattgtaaccggagcaaccactccgatttctccagcttataaaaacacatatacgcacatcgatatgttagaggctaaaaaagagaaaacaaagcaagaaaagccggaaaagaaagaaaaagaaaagccggctaaaaagaaaaagcaaaaggaatcaaatttagatgacaaagatattcaaaatctgattctaagcagccgtgagcaatttttagctcatcataaggaagagtatgcaaaagcacctattgcaagaaaaatgataggtatgggcttttctggtgactatacaaaacagcttccgccaaagatgattgaaatggatttttatgacctatttttctctttaggtatcatcggatttttactatgggttcttccacttctagtagttggtttaaccgtattggttcgattatttaaaaacccgtcacagcttcttgatgaaagctttatgatgtatagtacagcaattgtattagctcttggaattgcttttgtagctgggcatgtcttcaccgcaccagccgttactatctattttgcagcagcagctgcttatctgttcgtcattcattttaaacaaagacaagcataaaaaaacaggccattgaaggcctgtttttttatctttttaatggctgaaggcttaacaccgtatcacctgcattaacgtttatttcttgatcatgagcaaaaaaactcaatgcctttccctgcttgctcactgctagtaaaagagaagcatcgcttttctcctcaagatatgtttcatacgtatattcatccgtaatttttgtattgtaaatcgtatatccgtgctccattttatgatgcagaaactcccacgtaattcctttcttaaaaagcatgcgtcctcttaccgtgtgcataatttcatcgacatcttctcttgaatcttcttggtcacgaatactcaattgaaaaacattgttccgtcccatatcttgaagaaaagccgtacaaacaagtgcattatatgcatctaactcagttgcagcaatcacgtattcataaggagttaaatctagatgatattccgtttgctcagctagaacttctccgtgatacacatctacttccgctctgcgcgcaactcttaaccgctcccacgaagaatcagcaactaacactggatagcccagttgctttaacttggaagcaaaggcaaccgtaaaatcattgcttcctacaagcaaaataccaggttcttctccaattgataaatcaagcttcttagctagccatgaaagggaaaaaccgtgtgcacaaaccgtagcaaatactaaagcaaatgtcagtgttgttaggatggaagcatctttaaatccttcatcgattagtactttcgcaaagtaacttgagaccgttaacgccacaatgccgcgcggggcaatccagccaatcagtattttttcttttatagataaatctgtccctaccgttgataaaaagatggagacaggtctgacaataaacagcataagtaaaacaaacaaaataatattccaatgaaaaatttcagtaatggtcttcatcgtcagtccagccgttaacatgataaaaatagtagaagtcaatagaaccgaaatgttctctttaaaatgtcgcatatcactaatagatgaaatatgcatattagcaagggtaatccccatcgctgtcactgctagaagacctgtttcatgcttaatttcatcagctatcgtaaagcaggcaataaccacaataaatacgaccggagattttaaatactctggaatatgccccttttgaaacatccatcctattccgcgaccaagaagccatcctattaaaactgcaagaatagaggctgcaaagaaaaagagaattgtttttccactcacttctctcagcactaaaaattgaacaatttcaaacgaaaaaacggccagcagtgcaccaaatggatcaacaataataccttcccattttaaaatcgctgctggttttggttttaatttagcttgtcgtaaaagaggtaaaatcacggttggacccgtcacaataaaaagccctccgataacaattgccaccgcccatgataaatccgctatataatgagcagctaaagagcctaaaatccaagctagcatggctccgagcgtcacaatgcgaaacacaggcttttcgattccccttacctctctcatatctaagttcaagctgccttcaaataaaataacagctacagcaatcgatacaaaaggatcaaaaagctgtgcaaattgtgctttagggtcaattaaacctaaaatagggcctgttagtagtccaataattgacatcacgacaattgctggtaacttaaatctccaagccagccactgagatagaactcctagtcccactacgagcgtgatatgtataagcataggttccattgtatcttccttctctcgttcgcataatgtgtatatattttccctaaaataaaccgatgttatacaggaagaaacaaacactaccttgttttaccactttttcaaaaatgctaaacgcatactcttttctttgaatccaagctgctttctttcgttcgacacatattttactcgtgtttgtcgaatttcactttattatcaaataataaaaaacctttagcttctgctaaaggctttttgccggatgatccaattcatatagcttttgatagtgactgttcgtcgcaagtaattcatcatgccttcctcgaatggctatcttaccatcttgcaaaaataagatttcatccattttttccatcccaactaaattgtgcgtaacccaaattaaggttttatcttgaagagtttcaaagatagtggataacaaacgcttttcagtcatagcatccaaccctgcagttggctcatctagcataacaattggtgtatgctgaagcagaacacgtgctaacgcaatccgctgacgttctcctcccgagaagcgctgacctgtttcgagcatcggcgtttgatatccttggtgcaaaccttccacaagggagtgcatattcacttgcttcatggcctcaattacttcttcttttgtggcctcttcattagctagtaataaattgttggctacgcttgtattaaataaataaggattttgatttaatacagagatgagttttggtacatcttcacgaaattcagcaacagactgaccgtttagttgaactgtgccctctgtaggtgttaaggagccttgcagcaactttaatagagtcgattttccagctccactcttgccaagaatcgcaatttttttcccttgctcgacttgaaatgaaagatcatgaatgactgaatcctcctcattactatagcgaaagcttacatgctcaacttttaatctaaccgaattccatgaacctttataaggtagagaaagagtatgttttttcttttcgttcacatattcccagttcttttccatttcctgtactctatttaatgattcttcaaactgaggaatcttttctactgcattggatactggcagcagcgcttcagataaaggaaatactactaaaataaaagcagcaataaacacacctgcaagctctttatctgcaaaaagagaagctccaaaccaaatcattgtgacaattaaacctgctacaataagttgtccaaacaattctcggtaatacgtccatagtttaagcttgcgacccatgccgtctaactcattttctgttttgtcatacgaatgaaaaaatgactgctgctgaccgcttaacacccaatcagcaactcctaaaaagccgtctgtgaccttggcatataactgtgctttgcttgatttatatcgctgattggctgccttcatatgccaaagggaaaaaagcggcattactactactaataaaaataaatagagggcaatcaaacatgcaaactttaggctaaagaatcctaacgctacaatcgaaataacgtataaaataacagctgaaattgttggaagaatggtacgcaagaacaagtcttgtaaactttcaatatcttccgcgagaactcctaaaacatctcctgtttgatagcgagatgtagcaattaacggttcaatcaaatgataaagacgcgtacgcattttagctaaaatgcgaagaataaaatcgtgactgacaagacgctccgcataacggaaagcggctcggcttaaaccaaatgtacgcacaagtacaattggaacatacaccaataaaatcgtttctggccgtaaggaagaagctgaaatcaaataacctgacgtgaacattagcgcgcaagcagaaccaatcgttaacaagcttagtaataagatagaaaagatacgatatttatatgttttaaagtagggccatatccaacttttatatttcatcatatctcctcctcttcatgtaaaaattgatagtaagctccttttttttgaatcagttcttgatgattaccgatttctgcaacctttccgtcctctattacaacaatgagatccatttctttcatccaatgcagacggtgcgtagctaaaataaataacttatcctggaacatcgttaaaatatcttgctttaattcatattccgtttcaatatcaacttgtgccgttggttcatcaagcataataataggacggtcgcttagaaatgcccttgctagagcaatcctttgagcttggccgccgctaagctgtcgtcccccatcccctatcatttcattttccttcttaggcatctgttgaaccgttgataaaagtcctgctttcgttaaagcatcttcataatcatatgagccgcctctgtcttgataaaattcaatattttcttttactgttccattaaaaataaatgggtgctgtgggatatacgtaatctgcttttgccaagcatctgagcgtaaatcaattggtacgccgtttacttcagcagagccttctgtagattgtacaaagccgcttagtatatcaataagcgtcgattttccagctccgctttttccgatgattccaattttcttcattcctttaacatgcagtgacacatcttcaagagaaggtggatgctcttcgtcatattttacagtgatatgccttaattgaagttcactgttttcagtccaactaggaacatcttcttttttagccggcgatttttcagcctgcttcacaatcttaagtaatgcatctccggattcttttccgtctaatgttgcatggtaatcatttccgacttctcgtatcggcaggaaatattcaggcgccagcaataaaatcataagtgcaggctctaatgtcatagacccgtttacgagccgcaaaccaagcataacagccacgatggctacagataacatcgtaaagaaatctaaagcaaacgtagataaaaaagcaattcggagcgttcccattgtcgcttttcgataacggtcactgactctttcaatcgtttcagcatgctccttacttttcccgagaaatgttaacgtttctaaccctcgaagcgagtctacaaagtgattggacaacacgtgatatgtctcccattggctatctatttttttttgtgcagccagtccgagcaaaatcataaataaaattaaaattggcatggtcacaagtaaaataatgcctgaaagccgatcatggtaccaaacgaaagcaagaaccagccaaggtgttacgctaatggcagccagtttaggcaaaaacagctcgagataagcacgaagcttctgtaggcctgtggtgatgagcgtcaccaagtttcctgttccttcatctttggtaaaacgcggtcctaatgaaaaaatgctttgcatgactatcaaacgaagttcctgagtctttttgactccaaattgatatgctgttttttttactataaaacctacgatctgacgaatcataaaggcagacaaaaacaatccgattgcttttgtctgcgaagttaaactttcaccatgaaaaagagcggtaactacttcggcgagccacttagcttgaaaaataatggctacactttgaatagtaataagccctattaacatggcaagaaccatttttattccgttgtaaaccattaaatttctacccattaatactccatatgctccttatgatctacacgttttctgaaaacgtagtagctccaaatttgataacctaacacaaaaggcagtaatgcaatagcagcgtaagacataatttttaaggaataattccctgatgctgcattatgaatcgttaaactatagctttgattgattgaactaaccaaaactgttggaaacaatcctgcaaatatagaggaaattgataaaattaaaattaagccagacatagcaaatgcccatccgtcttttttacgtgtaaggaaaaatcctgctagtaaatacacgaaaataccgatgaaaaatgtatatagcatcaagcggctatgattactgaataaatccgtttcaaaaaacgtcatgcctgaaaagataagaagtaataaagcatttataggcaaaagcttcatagcgaccttccttgaacgatctctaatatcgtccatcgtccggatcgtggcaaaaataagtccgtgccataagcaaagcattgttaacgtaacaccgcctgtgatggtatatagattaacaatatccgaaaagccggcattcatttgcatgttgcgctcaacaggcagtcctttcattagcgctgaaaataagataccaaaaatgagcggtggaaaaagacttccaaagaagataacccaatcccatgcatttttccacgcttgtttttcaacttttcctcgaaattcaaatgctacaccgcgtccgataagggaaagcaaaagaaaaacaaaaagaacatatgacccgcttaatagcgttgcataccagtttggaaaagcggcaaacatagcaccgattgctgaaattagccaaacttcatttgcatcccaaaaaggaccgattgtattaataaaagctcgtcgctctaagtcgtttcttcctaaaaaacgagacaccattccaatcccaaaatcaaagccttctaaaaagataaaaccaacaaaaagaatggatactagtaaataccagaattcattaagagaaaacattgtatccctcctttgtaaatggatcagttgatactacttttgtatgtgcttcatgatcatgatctggaccttttttaatttctttaacgaacaagaacaccataatcacagctaaaattaaataaaagaacgaaaacgagataatagaaaacagcaattcacctgctgttacaccaggagacacggcatcttccgttttcatatagccaaatacaacccaaggctgacggccaatctctgtcataatccaacctgctgagcttcccaggaacggaaaggcaatggcaatcgtcataatacgtaaaaatagtttgctttcttgaagttttttacgagaaagcaagtacgtgccccaaatgcctaatgcacataatacgccacctagaccagccataatgcggaaactccaaaatgttgtccgaacgggtggaatataatttcctgctccatatttcgccgtataccgctcctgcagctcgttcatcccaggaacggaacctgaaaatttcccgtatgataagaagcttaataaataaggtattttgatttcccccgtatttttcttttcatcggggtgaatatttgctgtcaccgtccaagcgcctggacttccgctgttttcccataatccttcacttgcggccattttcatcggctgtgttttaactaagtatccagcctgttcatgaccagataatgcaattcctacacctgaaactaaccctacaataatggcaacttgaaatgattttttggcaaaagccaaatgttttttcttcaagagcataatggcactgacacccgtgataaaaaaggcgcctgttgcaaacgaacctaaaatggtatgagggaattcaacccacagctggccgtttgttagcaatttaaagaagtcattcatttctaaacggccattattcagctccattccaaccggatgctgcataaaagaattagccgttaaaataaagaacgccgaaaaaatagtacctagactaacaagccaaatacatagacagtgcagccatttaggtaaacgatcccacccgaaaatccacagtccaaggaaagtggactccataaaaaacgcgagcagtgcttcaatagcaagcggcgcaccgaatacatctcctacaaaccttgagtactctgaccagttcatgccaaactgaaattcttgtaaaatacctgttacgactccgacagcaaagttaatcaggaataagtgcccccaaaactttgccatctttttatactgttcatctttttttactacgtacatcgtttccatgatcgctactaaaaagacaagaccgatagatagcggtacaaagataaaatgaaacagcgtcgttgatgcaaattgaatacgtgatagtataactgtatccatcttctttctcctttcatatataagaacattcatcatttccatagatactttgctcatttctgagcatcttttacttgcattgtgaaacattgagcataataattcgagagatatgctcattgtttcacatacatatgtaatatctctctttctatttacatagtatagtctatttttttagctgtgcacgtgcattttttgaacgtttttagactaaaacgtgactttcttgtgacaaaaaagtgaaggatctctttatttttctcataaaaaaagcacgctctgatttgagcttgcttctctatggtcgatattttgctttggcatttaatttagactgacgaatgatttggttgatgacttcagaaaacacaataccaatggcaattgaacctgaaatcataaaggcttttgctgcaagactaatcgcttcattatagttattttctacaaagttacgcatggcatcgtatgctgttcctcccggaactagcggaataatacctgctacggtgaaaataatgatcggcgttcgataaatttttgcgtaaatttgactaataatagcaataaagaaggccgatgcaactgtgcttggaatttcatctacgccatagaacgttagcaaatagtaaatgagccagccaatcattccgacaaagccactttttaataatgattcacgtggaacattaaagatgatcccaaatgctgctgaagcaataaaacttgtaattatctgctctacgatatgcatatgatgcctcccttctatagaagtgtaaatacaatggcaatacctgcaccgatagcgaatgccgtcagaaacgcttctgctccttttgataatccagacagtaaatgtcccgccattaaatctcgcactgcattggtaatggataagccaggaacgagtggcataacggatccaataataattttatcaatttgcgtgcctactcctgaagcgactaaaagagctgataaaagtccaataactaacgaagcggtaaactcagcaaaaaagcgaatcggaataaggcggtggaaatacaccacggttaaaaatccgagacctcctgaaaacatagctggaataaagtccgtccataaaccttgaaacatgattaaaaagcatccgctagaaatggatgcagctgcaagttgaacccatagtggaaaagctacgtttgttgcttcaatttcttgtagcatttcatacgcttcctccaaggagatgtttccttgactgattgttcttgagacgctatttaccatggttactttttttaaatctgtcgttcgttcggaaatacgaattaacttcgttttcgtcggttctttcgtttcaagtgaaaacataatccctgttggcgtcacatagctgtgggatttttttataccgtaagacgctgcaatccgcatcattgtgtcttctactcgatacgtttctgccccgctttctaacataattttacctgctagtaagctaacgtccataatttcatatttatctaatttttgttgtgtcatcaaatcgctccaaacatattaaagcttggttttttcccctacagcatacagtgtataagaaagagggaagtggacgcaatggttaatgtaaaaaagtgtggactttttgtctcacactttcaggaatagtatatacattccttatcaattcatacgttttgtggtctcgcgctctactaatataggtgccattttatactgtatctgatctatttcttgctgatcctgaatttgctgaagtaagaggtttactgctttttcagccattttttccatcggttgacggatagttgttagtggaggatgcgcttcactagcttcagtaatatcatcaaaccctataacagacaaatctgatggaacgtgaagcccattttgccacgcacagtgtatcactttcagagcgatgtaatccgtagcacaaataagcgcagttggaggctctggatgatgagctagctcatttataaactgatatagttcatctgagttattcatatcttctttcacaaactttgcgtttgctgacggtacatactgataaaaaagagacagacggtgctcgactccgcttacagcttttccaacgaaccctatattcttatgaccaaggtccgttaagtgagcaacagctaattgcattcccaccgcatcatctacatgtacaatcggccaaagtgcagaagaggcgtctcctgtaagagaaacgtaaggcgtttgatattgttttaatacatctacaaacggatgctgagcagctacatagtctaataaaatgaccccatcaaaccaatggttcatcataacatttaattgacgctcagccgttgtttcttcgtaatccgtgtgtccaataagaacgtccatccctcgactttggacttgttgctgtaccttttttaatagttcaattagaaacggatcttttaaatctctaattaatatcccgataatccctgttttttgggcccgaagagctgccgcaaatggattcgtctgataccccaaatgagctgctgcttttagcactttttgtttagttgtttcactaattttaattttaccttctttattattgaagattcttgataccgtagctaatgaaacacccgcttcttttgctacttctgtaatcgtgactttttttctccccattcgtaccgactcccatttccttttagtctatcgaccaagtaaacatttttctttattatactactagaagccggcaccactgaaaactaccttccctacttttcactaaacagccacttcaacacatcttgaattttttgatcccaatatgcccagtcgtgacttccttttccttcttcatatgtaaaacaaatagcctcttgcttacaacgctcggaaaaacgtttattttcctgatataaaaaatcttccgttccacagcattgataaatacgcggagtcacttctccatagcgccggcgattttcaagcagccagaaaagatcatcctcaggtctaataacagggggcatgccaaaaatcaaaggataatctaagaactgaacttctcctcgccctccaagcccttcaacgtccatcactcctgataaactggcagctgcagaaaattgatgtggtttgcgaaacgcccattttaaggcgccgtaccctcccatagaaaggccagctacaaaattatcttctcttttttccgataacggaaagaatgatctagccaagtgaggaagttcttctgttacaaacgtccaatacttctttccataagccatatctctataaaagctgcgatctacatttggcattacaactgcaagtcctaattctgatgcgtagcgttcaatcgaagttcttctcatccatatcgtatgatcatcagaaaggccgtgtaataaatagagcgtagggtgtttctcacttcttgtattggtttgtaaaccaatttgagattttgtttgctgcggtatcaaaacgttcattgaagtacttatttgcaatacttctgaaaaaaaatcacattgcataaacgccatatttctcttccccctattttttcttccctattggttgataacaaaacgtacataattcatataaaagttgaaaaatagtttgattatttacaatttttagtttaacataaaaacatcttttatgaaaacgttttacgtataacgtttttttaattgaaatagtgacggtgattcaaaggaggaatttatatggggatagtaaaagtaacttctgacgagtataaggagcaaaaaggaaatctatttttcgtgattttcatttcatgtgcagctgcttttggagggttgctttacggctatgacacagccgtcatttcaggagctattgggttgatgaaagtacattttaatcttagtccaacgatggtaggttttgttgtatctagtctgctgctcggtggtgccgttggggtacttgcttcgggaaaactgagtgatcgattcggtagaaaaagcatcttacttttagcagcttctttatttgtcgtatccgcaattatgcaagcgctatcttcatccatctcttttgtgattatttctcgaattattggaggactaggcattggtatggcttctgttctttctattacctatatttctgaaatagcccctccgcacatgcgtggccgcttaggctctctataccaatttgctgttgccgttgggattgtttctgtctattttgtaaatgactacattttatctattggggaagacgcttggcagaattccacgggatggcgctacattatcggtgcttctggtattccagctcttttatttcttcttattctttctcctgttcctgaaagtccgaggtggctggtaaaagcaaaccgcactttagaagctatggacattttaattaaaatcaatggtacacacattgcacgccaagagctgtatcatattgagcaatcgttaaaagaaaatcaaccagcttctctttcgctttttaaagaggcctgtcttcgaaaagcgctgcttatgggtattctacttgcagcctttcaacagcttgtcggaattaatgccattatttattacgccccgcaagtttttgaagcagctggagctagaggagatttatcgctccttgttacgtctatgattggtgtggctgcctttttaggcgttctttgttccatgtggcttatcgaccggattggccgcaaagctttattgcttattggcacagctggtatggccgttacgcagcttctcgtttcctttgggtttcattttcaaggtactgaagggttgactactagtttacttattgttttttatttatttctttttaatatttctatgggaccggttgtatgggttgtgatttctgaaatttttcctaatcacgcgagaggctatgcaatgtctatttctacgtttttcttgtgggtagctaattggtttgtatctcagtttttccctatcctttggaacaaagctggaggatcttttacatttttattctttatggttatgtgtctcgcttcatttttgtttatatggaagtgggttccggaaacaaaaggaaagtcacttgaagaaattgaacatatgtggaagtaaaagaagaggttgggatataaccaaatgagtccaatctaaagacgaacaaatgggatacatgagctaaacggcttatgacaccgtagttgatttccgtgcaagacttcgctttccgcgggcggccgctgagcctccttgtcgcttgcgctcctgcggggtctcatctgttccgcttttcccgcaggatccttcgtctcgctctccaatcaactactagaagaatctaaacaaatgaaaactatgttcatcctaacaaaaaaaacgaaccactaatcaaaaattttgatcaatggttcgtttttactttgtctaaaatattttcgtcccagcctcttcttttttatcgaatttgtccatctccgtaaataatatattttagcgttgttaattcttttaatcccatcggtccacgcgcatgaagcttttgtgtactaattccgatttctgccccgaaaccaaactcttctccgtctgtaaacctcgttgaagcattcacataaacagcggctgaattaacgcgctgtaaaaaacgctgagcatgggcataatttgttgtgacaatcgcttcagaatgatgtgaactatgaacattaatatgggaaatcgcttcatcgatatcatctacgattttaaccgccatgatgaaatccaagtattctttcttccaatcctcatcccctgcgggaacaagatctggaacgattgttaccgcacgttcatcaccgcgtacttctacatctttctctcgtagcgcttgaacaataatcggcaaaaattcatgagccgctcgtttatggataagcagcttttcggctgagttacacactgctggacgagatgtttttgcattaatgacaatattggccgccatgtcaccgtcatattcttcatcaacataaatgtggcagttcccagttcctgtctcaataacgggaaccgttgcattttttaccaccgcttcaattaaaccagcaccgcctcgaggaattaatacatcgatatattcatttaatttcattaactccagtgctgtttctctcgacgtattttcaataagctgtacgctatgctcaggcaaccctgcacttgccgcagcttgagataatacagaaacaatcgcttgattcgaataaaacgcctcgctacctccgcgcaaaataactgcatttcctgcttttaagcataagcctgttgcatcacacgtaacgtttggacgcgcttcataaataattcctatgacaccaataggtacacgctgctgtccaatttgtaagccatttggtcgcttcgccatagacagcacttctcctaccggatctgcaagcgcagctacttggcgcaggccgtctgccattccgtgaatccgctcttcatttaaagatagacgatccaacatcgcttttgacgtgcctttttgaatggctttttctacgtctaatttatttgcttttaaaatcgcctcttgttgatccaatagagcagccgccattttataaagtgcctgctgtttttgttcgctcgttacatttcctaagaaataagaggcttcttttgcctgctttcctttaagctgcaattcactcatttcattactccttcagcttgttttaagaataacgttccaatttcttggccttcaataatatctcgcaaaatacttggttctttaccatttgctaagattaagctcacgcctgcacttgtagctgttttagcagcggtaagctttgtgaccattccgcctgttccaacatccgttccgctatctccagcaaaattctcaagctccggtgtgatgccatctattactttcattaatttagagttagggttttttgtgggatctgaatcaaagaaaccgtcaatatcagataaaataacaagtaaatctgcgtgaatcaaaactgaaacaatggcagataaattatcgttatctccaaaacgcacgatgttttcaatttcatcgattgcaaccgtatcgttttcattcacaataggaattactttgtcttcaattaatttttcaaacgtgttcacaacgttattgcgcacatgttcatcttcgattacatccttcgttaacagtacttgaccaacgatgtggctgtactcaccaaagaatttactatagatatgcataagctcacattgcccgacagaggccgctgcttgtttttctcgaatagaagttggcttttcctttaactttagtttttttactcccacttgaacggcacctgatgtaacaagcacaacttcttttcctgcattcattaaatcagataaaacacacgctagtttttcaatgcgtgctaagttaatatctccattatcataggtcaacgtagatgtccctactttgactacaatacgcttgctattttgtaactcttgacgatggttcactcttttcatctccctaactaaaacacctaaatgcgtactaatttttttaaaaattatagcagagattatgcgaaaagtcttatagttttttaaagggaatttgaactttctaattttttaaataattaagggaaaaactggtgataaaagcgctttcttcttttataatgaaagttgtaaggggaacacacaattacataacgttgtgtagtagtacaaacatcagacaactaagggatagggggatttttaatgaatgcggttacgattgttattggatctatctgtattttaatgattgcgtatcggctatacggaacattcatggctgttaaggtcttgaaactaaacgattcgcaaaaaacgccagcacatgaacttgaagatgggaaagattatgtgccaaccaaccgatgggtaacatttggtcatcactttgcagctattgcagctgcaggtccgcttgttggacctattttagcagctcagtttggctatttgcccggactgctctggcttttaataggagctgtaatcggaggagccgttcacgatgcggttgtgttatttgcatctatgcgccaaaaaggccagtcgctttccgaagtggctaaaaaagagctaggacctgtcgctggtttttgtacaggtttagctatgctttttatcattaccatcacaatggccggtttatctatggtcgtgctacacgcacttgagaaaaatccttggggtacattcgctgttggaattacgattccgatcgcaatgggggtaggtatttaccacaaaaaaaccggtaatttaaaagcggcttctactgtcggcttcattttaattttaatcgccgtatttagcggtccttatattcaaggaacagctttaggagattttttaacgctagatattaaaacactttcaattattcttcccgtttatgcatttttcgcagcggccttacccgtttggctgcttttagcacctcgagattatttaagcagctttatgaaaattggtgtctttatcgcgctgattgtaggcgtgtttttcgtaaatccagcaattccatttcctgcagttactgaatttattcacggaggcggccctattttagcaggacctgtgtggccgttcatttccattacgatcgcctgcggtgctatttccggcttccatgcatttgttggttcagggacaacccctaagatgctcgaccgttggagtgacattaaagttgtaggcttcggggcgatgttagtcgaatgcttggtaggaattatggcattaattgccgcaacagctttacatcctggagactattttgcaatcaactctacacctgaagtgttcaaaacgctcggcatgaacgtgacagctcttcctcagcttagccaagagattggtctaaacttagaaggccgtacaggcggcgctgttacactggccgtaggaatgacatatatcttcacggaaattccttggttcagccacctgtcttcttactttttccaattcgtcattatgtttgaagcagtgtttattttaactgctatcgacgcgggtacacgcgtttcccgctatttaattcaagactttttcggtgaattttataagccattgaagcgagtagactggcttccggggtccatttttgcaagcgccctagcctgttttatgtgggggtacttattgttctcaggagatattggctcagtttgggcgctgttcggcgtatcgaatcagttaatggcctctattggtttaattattggagcaaccgttattcttagaattgcagataaacgctcctatatgcttacttgccttattccactagcctacctttacgtaacggttaactacgcaggttattggatggttaagaatgtctatttaaatgaagctgcggcaggttacagcatattaaatgcgactctttcaatcatcatgcttatactcggtctcattattatgattgctgcgattcaaaaatggacgcagctttggcgcacgcctcaggctgaactggcagcgaaagcaaacttatcacaaaatatataaaacgaacacgcttgcttatataagcaagcgtgtttttaatatggtaatagccggtcaaaataattgcacaccaggcatttttattattaaactaaatatactatacagaaaattttttaaatagttcgtacacttcacatgttatataccccattgactacatctcaaaattaacactttaaattataataattataatttagtattgattttttatttaaaaatgttattattgtttctaacataataaaattcaaataagaggtggttctaagatgacaacaaacaagaataacctaacgactagttggggagctccggttggagataatcaaaattcaatgaccgctggttcacgcggacctactttaattcaagatgttcaccttttagagaaattagcccattttaaccgagagcgagttcctgaacgtgtcgtacacgcaaaaggcgccggtgcccacggctattttgaagtgacaaatgatgtttcatcctatacaaaagcagctttcctttctgaagtaggaaaacgaacacctctatttgctcgcttttcaacagtagctggtgaaaatggctcagcagataccgttcgcgaccctcgcggatttgctgttaaattttatacagaagaaggaaactacgacttagtcggaaataatacacctgtatttttcatccgagatgcgattaaatttcctgactttattcatacacaaaaacgcgatccacgcacacatttaaaaaacccgacggccgtttgggatttctggtctttatctcctgaatctttgcatcaagtttctattttaatgtctgaccgcggtattcccgcaactttacgccatatgcatgggtttggcagccacacatttaaatgggttaatgccgaaggagatggcgtttgggtaaaatatcactttaaaacagagcaaggtgtaaaaaatctgtctccagacgtagctgcaaagctagctggtgaaaatccagattatcatactgaagatttatttaatgccattgaaaaaggcgatttcccttcatggaaactgtacgttcagattatgccattagaagacgctgatacgtatcgctttgatccgtttgatgtaacaaaggtttggtcacaaaaagactaccctctaattgaagtaggtcgcatggtcttggaccgcaatccagaaaattattttgccgaagtggagcaagctacattctcacctggaacgcttgtgccgggaattgacgtatcacctgataaaatgctgcaaggtcgactattcgcatacagcgatgcacatcgctaccgcgtgggtgctaaccatcaagcgctaccgattaaccgtccgcgcagcgaagtaaataactatcagcgtgacggccaaatgcgctttgacgataacggcggccgttctgtttattatgagccaaacagctttggcggcccaacagaatcacaggaaaacaaacaagcagcataccctgtttcaggcgttgccgatagtgttgcatatgatcataacgaccattacacgcaagcaggtgacttataccgccttttaagcgaagacgagcgtacacgactagttgcaaacatcgttgaagctatgaagcctgtagaaaaagaagagattaaacttcgtcaaattcagcacttctacaaagcggatccagagtatggaacacgcgttgcagatggtttaggattatctgttccgcagcaaataaaataaagatatcagttttacaaatgagaaaacaaggttatttttctcgttgtagattctcgtttattctcaattagtttaacattttatcactaaataagtatccatattttatggatacttatttaaattcttgtaaaaagaggaagggatgaagaaatgattggacaagaaataagatgtaatcagtgtgatagagaaataaaagtactaaagcacagtacgctttgcggttgcggaataaaattacgaacgctaaaaaaagagaagcaaccagcataatgaggttgcttctcttttttactagatatgctggttatattcactcacattaaagagtaatcgttactttaaataaatctccgtcaatttcaatattcagttctcctccgtgcaaatcaataattgacttagcaatagctaacccaagtccggagccatcggtttgtcttgaagtatcccctcttttaaatcgttcaaacagctcatctgcctgctcatttaattcatatttacttacatttttaaaggttagtttcacttgttcgtttatttcttgaacagaaatatagacacgcgtttgttcaagtgaatatttcaatatattctctatcaaattgtcaaatactctccataatttttgaccatctacagtagcaaatagcggcttttcgagagattgaatacgaaattgcagagttgaatcttcaattgcttcattatattcagctaaagcctgatgaagaagctggttaatatcaattttgtctttatgcaattctacatttccacttgccatttttgacacttcaaataaatcatcaataagtgtctgtaaacgttttgacttacggtcaataatttcaacgtaagcatgttgttcgtccgaagtaagatcttgtgactttagcaacgctgtatatgtcataatagaagtcaatggtgttcttaaatcgtgactgacgttggtaattaactctgttttcaagcgttcacttttaacttgaacatgctgagatgtttgaatctgctgctggatatgatttatatttagtgctgcttgagtcaaagctgatttccctttgataggtaacggctctttccactcggctgtggcgatttgatcaattgagataataattttatttaaataattaactcgtagcataagcagtatcaaagtaaccactcctacaacacttccaacagctaagtacagtatggatacttgttctgcaaacatagatccactagtcaatagagctgcaacagcaaacacggcaaacactaaaagcagcactacaaccattatatgcatgccaatatgtctgataataaaaatagattgaagaaaataaattacttgataaacacacgctcttttatattcttcttttatatcatctattgtgcgtatacgctgaaacagtagaaatacttgaagtgcccatagggaaatagctatggatattgctatcatataaaagaagaacgtagcaacatgcttatatgattctaataaagaagcaggatagccgttcagaactagacttaatgtaaaaaatgagtataaaagaaaaacaattatacaaatatctaaaggtatttttttataaaccctctgtactgcagtttgtcttgttatttttttaaaatatccagttattgtttttttataaataaagcaacctattaacagagctagtatccctgacaatgtatacacgagaaacgctacattttgatgatgataatagttatactcatcaaataaaggactaatgaaggtttctttttcaggaacagcacttatacccgtaaacttctgctttaaataccgggttgggatctctgagtctgcctcactgcttaacgatgaatttttatattcatctgcttgaaacaccagcggtgattgagctgaataagtatatttatacaatatattttcctgttttactaattgattaacatcttctttgcctgcgttttggatattcgtgtatattttatttgtgttcctatcttttaaataatacatgatgtcttttttatattgagataattttttttgtcgatcaaaagcttcatcatatagtttcttcatttcgagttttttgtttttcgctatttctcctcgaacgaattgatcatcttgaaactttttttgaatgtttttaacttctagatcctgctgctttacataggcagcttcaacgtttttgctctttgcctgcttagcgtcttctattttttcttcatatttatcgtgcacgttttttatttgttctgttaatgttccttccttatatcgatacgactcaatctcttcttctgttatcttatttgcattaacggtattcttatctttttgtgtcaattctaaaaggtagagatcatttgtaaaacgacttatttgctttttgaagtcttcagattttatatagctgcttttttgtaaatagtttgtttttaatagattatgcacgttactaattgaagaaatagttgctcctaaaccaaataaaaacaagataatccctacagctgaaatgacgctacttttccattttatatccaagtccccacacaacctttacatacctcggattttttggttcaatttcaattttttctcttatttttctaatgtgtaccgctactgtgttttctgcgttgtagcctggttcattccatacgcgttcataaatatcatgtatggaaaaaactctccctgcatttttcattaataactctacaattttatactcaatgggagtcagcttaatgaatcccccgtcaagagtgacggacttagcttcaatatcaagtacaagacctcgaatatcaatcgtctttttttcctcatatgtacctaatgtcacatatcttcttaactgtgatttaactctcgctatcagttctaatggattaaaaggctttgtcacataatcatctgctcctacctgcagaccgagcactttatctgcatcttcgcttttagcactcagcataataatcgggatatttttttgttctcggattttaaacgtcgttgaaatgccatcttgccttggcatcataatatcaagaataattaagtgaactttttctttatttagtatctctatggcttcgattccatctttggccgtaaagactttaataccttcattttttaaataaatagcaataccattacggatttcttgctcatcgtctacgactaaaaccacatattcgttcattgatttctcacactccttttaaaagtatatcatgggtcattccgtctatggattttattgtaaactgcatttcttaagaaaaaggaaggggaaatcttaagattttcttaagcttcatatgttgaaaaaggtttaaagaatagggataacaggaacgttaaaagaaaaaatataatcaattcctcatttgattctaaagaactatccatgagcgattatatctttttatttaaaaggaggatgatttaacttggaacggaatcatacaattatgcaatttttcgaatggcatgtgccagctgatggagagcattggcaacgcctcaaagagctcgctcctcaactaaaagaacaaggaattgattccgtgtggattccgcctgttacaaaaggtgtttcatcagaggataatggctacggcgtttacgacttatacgatcttggcgaatttgatcaaaaaggaaccgttcgtacaaagtatggaaccaagcaagagctgcatgaagcgattgatgcctgtcataatcatggaattaatgtctatgtggatattgtaatgaaccataaagctgcagcagatgaaaaagaaacgttccacgtcattgaagtggaccccatgaaccgaacagaagaaatttctgaaccttttgaaattgaagggtggacaaagtttacatttgaagggcgcggcgataaatattcttctttcaaatggaactttaatcattttaacggcactgattacgacgataaaaatggaaaagaaggcgtctttcgtattgccggagaaaacaaaagctggaacgaaaatgtcgatcaagagtttggcaactacgattatttaatgtttgcgaatattgattacgatcaccctgaagttcgagaagaaatgatcaaatggggaaaatggttagcagacaccctgcagtgcgacggttatcgattagacgccattaaacatattaaccacgattttattaaagagtttgcccacgaattgtcctcttctcaagaaaagccattttattttgtgggagagttttggaatccagagttaacagcctgtcaggaattcctagacgtgattgattatcaaatcgatttgtttgacgtatctctgcactataaactacatgaagcctctcagcaaggaagagattttgatttaaccacgatttttgatgatacattagtcaagactcaccctttgaatgttgtcacatttgtagataaccatgactctcagccaaatgaatctttagaatcgtgggtagaagattggttcaaacaaagtgcttacgctctaatcttacttcgtgaagacggctatccttgtgtgttttacggagactattttgggataggcggagagcacccaattgagggaaaagaaaaagatatttccgctctcttgcatgtacgctatgacaaagcatacggccagcaagacgattattttgatcacccgaataccattggatgggtaaggcatggtgtagaggaatttgagaagtctggatgcgctgtagtgatgtcaaacggcgaagatggcgaaaagagaatgttcgtcggcgaacaccgaagtggacaaacatggattgatttcacaaacaaccgagaagatcaagttgtgattgaagaagatggctacggacagttccctgtcaatggcggctctgtatccgtttgggctgaagcataaaaaaacagtggcttgcgccactgttttttttaccatagacctagcagtttccaccacaagccgccaattccaatccaaatgataatatgaataattgaaattaaaaagccgagcgaccaccatttttgctgcgttacatatccactaccgaagaacaccggtgccggtccactgccgtagtgagttaaacagccaaataaattgctaaagaacgctaaaattaatgctgacagtaacggaggcgcaccagcggccacgatgacagataaaaatgctgcgtacatagcgctgacatgagccgtattactcgcaaaaaagtagtgagaataaaaatacgcaacagctagtacaatcaacgccgtcatccaagacatatgactaacagtgcctttcatcagatcactgaaccaaggaatcatgcctagatcatttaagaaggttgccatcataaccaaaacagcaaaccaaactaatgtatcccatgctccctgttcttttttgatgtccgaccagcttaacacttgcgttaaaagcagcgcacatagaccaataaaagcagttgttgttgcattaatatttaaattagctccaaaaatccacagcacaagaagaagtaaaaatacgccaatcatgtaccattcttctttctttaacggacccatttcatttagtttttttgctgcaatttcagatgcttccggcgtttcttttaattctggcggatacagcttataaataacaagcggaataacaattaaactaataattccaggtacaattgcagccgctgcccagccaacccatgaaatagtcttgcctgtaatttgttccgtcattttaacagcaagaggattggccgccattgccgttacgaacatagcggatgtgatcatatctccttgaaacgatacttttgttaagaaagcgccgactctgcgctccgtaccgtctccagttctggatccgtatgtttcggataaagaacgaatgattggaagaataattcctccagctcgcgctgtattagacggcattgcaggtgataaaagcaagtcacttacgataagagaatacgataatcccaacgtctttttaccgaacaaacgaacaaaaatgtaggcaacccttgttcctagaccagtcttaataaaacctctagaaataaagaatgcaataacgattaaccaaatcgtcgtattttgaaaaccgctgagcgattgttcaagtgttaatgtattagttaatacaataatggttaaagataaaatagctacactgcctaatggcaatggtttaatgataagccctacgatagtagccacaaaaatagcgaataagtgccaagccttcacatcaagtccagacggaggtgtaataaaccataaaataagtccgattgccagacaaattaataaaggaagaaatttcacttcgccggcaggcttttttgttgtttcagccataatctttctcctttcatgtttttaaataatagtaatagtatgctctttccacttcgtacccaatacttatcccatttaaaataaaataattgtaaaaatacgtttcgtaaggatgatattgtaaaattgtgaaatgttgagcatgattcctttattattttatcatatatattgacaatatttatctcttaccttcattttattcccttcaaaatagcttgtaagcgttatttcattaaaaataaataaactgcatgagttcatcatgcagccttgcatttagcgatttactttttgaataaacacgacttttaaataattacctgacttaaattcttttattgttttaaaatcagctggaagagcgaactgctccatcattttgtaccgttcccctttttcattaaaagctttttcaataaacgaatggaattttttcatatcaaaattgcttgcattcgtagatgctacaatgacaccgtttggctttgtaagcgcaatggcttcttttaataaatctttgtagtcttttactgcgctaaacgtatgctttttcgacttagcaaagcttggcggatctagcactacaagatcgaacgtcatattcttcttaaccgcatatttaaaatacttaaaaacatcttctacgataatgtcctgtgcttcgtgatcaattccatttacactaaattgctcaattgtttttgccaagctgcgattggctaaatcgacacttgttgttttcgcagctcctccaagagcggccgccactgaaaatgcgcctgtatacgaaaacatatttaagacggtctttccttttgcatatttatctcgaatagttttacggacgtctcgctgatctaaaaagactcccaccattgctccgtcatttaagtaaacggcaaaacgaataccattttcttttacaattaaaggaaattcacctttgtcccctgctacaaaatcatcttcttcaatatactgaccttttacgttaaaacgttttttctggtacagccctttaaagttaggcgcagactttaaggcttcaatgacgtattctttaaattgataaattccttcactataccaactcatgacgtaatatccgtcataataatcaataatcaagccgccgattccgtcaccttcactattaaatacgcgaaaagcagttgtgtcttcagatgcataaaagtcatgacgagaggcaatagcttgctgaattttcctagcaaaaaacgccgcgtcaatttgctcacttttcttcttcgtaagaatccatccgtagcctttgttttgttttccataatagcctttggctaaaaattgactcttcggagtgactaagttaataataaccccttcttcttgcagtttatgaccatcaacaagcgcatctttttcaatgagtggataacccttgttcacttttttaataaaagcttctttggctataacttgtacttcttttctcatgtgtacaccctatctatttaatttatttcattctagttctatccattttacaacaataatctacatttatcttaacatagataaacagccccgtttctagttataaatagaaaagcagaggatgccttgaaacaccctctgcttgatatgaataaaaaatgaaatgtatgttttatgttttaagataaacaattatgagcactcttgccccgtataagcatcgaactgagtgacgtttttttctgctaaaatacctttcacttttgctgtacaagccaaagcgctttttgtcttgtcgcctttagctatgtgtttattgtaagagcggaacatgaattcactgtgaagcccggctgaatgctatctgaacaaattctgaaagatagctgaataacttctagttaaacttgtcatataaatgttcaacgttcttaacaacagctcaacaaatccagcgcttctctttatatttcctcaacaatcaaatgatttaataagtgtatgaatacaatttggaggttatcaaccatgaaaaaacgagtatctcttggactatctctcactcttttagcttctagcgccacttctgcttttgcagcagaacatcacccagttcaacatccaaaacaaatcaaaagcgtcgagtttcagccaatgaaagcacctactacgattgaaaatatgattaaaacgtatacagaggcatctgtaaaagtaacgtataaagatggaagcgttgaagaaacgccgcttaactataaccagctctttctttcaaaagataaaattgtcgataataaaggggaattaatcgccgcaggtacaccgatcgatgcaaacggggatccgattattgaccgaagcgttcctgataagccatcaccgtacgtatcagatgcaccggattcaaacagctttatcaccatcaacgataagtcttatattatttcacattatgaatatgaatctgttaataatgctggaaaagagatttccggtcttcctgcttcaatgacgcttacacaagttgaccgagatgataaaacaggaaaactgaccgtcaaccatgctaaaaaaattgatttttctaatgtaaatggtttgtggacgccgtgtaatggctcgacaacggattggggtactcaccttggttcagaagaatatgagcctgatgcacgtgcttttgaagacccttcatccagctcttataaagacgtcacgaacttcgctaagctttatttcggcgacatgccaaaagcaaatccttactactacggctggattccagaaatttcagtagatgaaagcggcaatgcgtcggtcgtaaaacattacagcacaggtcgtttttcacacgaaatgatgcaggtacttccagataacaaaaccgctctttttggagacgatgggtctaataccatgatgtttatgtatgtagcagataaggaaaaagacttctcagcaggaactctttatgcggcaaagtttaaacaaacgagcacaaaaaatggaggtaaaggcgaccttcagtggatgaagcttggccatgcaacagacaatgaagtgaaaacaataatcgacaaaggcacaaaatttagtgatatttttgaaacagctgaccagcctacaaaaggatttaaagcagtcaaaaccgccgcaagtaaaaaagttgaatatttaaaagtaaagcctggcatggaaaaagcagctgcctttttagaatcacgccgatacggtgcaattttaggtgcaacatctgaattcaacaagatggaaggactaacggttaacaaaaaagacaaaaaagcgtatatggctatttcttaccaaaatagtgccatgctaaaagaatctgatgctgtacaagatgatattcagcttccaaaactagagtctggtgtgacctaccagctgaacttaggatcgcatcaaaaagaccaagcaaaaggcaagattaacagtcgctacgttcctgcaagcatggaagggctactgattggacaagacctagaaaaagcagatgcatacggtaataaagcggatccaaataaagttgccaaccctgataaccttacgtattcaaatgacttaaatacactctttatcggagaagacagctcactgcacacaaacaacttcgtatgggcttataatgtaaaaacaaaaaaactatcacgcattctttcagttccagtgggagcagaagcaacaggtcttcgtgcagtagaaaacattaaaaactctcgctacgtactaagcaactatcagcacccaggcgaggacatcagcgacaaaaacattaccgctgttgataaagaagagctagctaatgcaatgaaagaaagcattggcattcaagaaacaggtggtgtcggatacatttctggactgccttctaaggaccgcgctccttacaaaaagcattaatacgtaatgaagccacgtctgttgtgcaatgacagacgtggttttttatatagtcgaagttatttataaaatcgtttatcgtaatcatcattacagtgaatactttataatatccttcgagaaagtacctacacacgaaccaaatgctttaggatttattcgcaggtatccgttacatgccttcaggctcgcttttaattgcttacactccactaatactagatataaaagttgtttcaataagtatttccagcaaaacaaaaccactcgttcccttgcacttttcgttccataccattaaagtatatattggttgaagtttatactggcattcagcctgataaaagaaattacactttttaattttgggaatatgttttccctaaaagaaagggtttagatataagatgaaagataatttttggcatgagttgccgcgtccgttttttattttggcaccgatggaagctgtgacggatgtcgtttttcgccatgttgtgactgaagcagcacgacctgacgtattttttacagagtttacgaatacggaaagctactgccatccgaaaggaaaagatagcgtaaaaggacgtttgacgtttacagacgatgaacagccaatcgttgcgcacatttggggagacaagcctgagtacttccgtcaaatgagtatcggcatggccgaaatgggctttcgcggcattgatattaatatgggctgtcctgtgcagaacgttgcaggaaacggaaaaggttctggtctgattcgccgtccagatactgcggctgagattatccaggcagccaaagctggagggcttccagtaagcgtaaagactcgtcttggctatacgcaagttgatgagtggtacgactggctgaagcacattttagaacaggatatcgtgaacctttctattcaccttcgtacgaaaaaagaaatgagcgatgttgacgcgcactgggagttaattccggagattaagaaacttcgtgacgaaattgcgcctcatacgctactaacaattaacggtgatattcctgaccgccagaaaggtctggaacttgcagagaagtacggcgttgatggaatcatgattggacgcggaattttccataatccgtttgcgtttgaaaaagaaaagaaagagcacacaagcgaagagctattagaacttcttcgcctgcagctagatcttcatgataagtattctgaagaattagagccgcgtcctttcaaaccgcttcgacgctttttcaaaatttacgttcgcggattccgcggtgcaagtgaattaagaaatctactcatgagcacggaaacaactgacgaagtgcgtgcgttgcttgatgagtttaaagacagagctggagtgaaagaagacgaaggtttttctgtttcttaaataagatctcgtttgcttaaactcaattgttctaacattttaccggagagaagaacctcttgttcttttttatagacgtgtgctatttatccacatatgataaaagctgaggcagaaggttttacatttccttctgcctcagcttttaatgaaaaaatatccacacgttctatttatgataaggttcatttcgaataatacgaaaagctcggtaaatctgttctactaatactaggcgcataagctgatgaggaaacgtcatctttgaaaaagaaagggctgcgtttgagcgtttcattacttcgctacttaaaccaagcgacccgccaatgacaaatgctattttgctttttccgtaggtagctaatgaatcaatttcttttgcgagttcctcggaagatttttgttttccgttaatagctaatgcgatcacatgagtatcgtctgagattttcgctaagatgcgctctccttctttttgttttacctgttccatttcagattcacttaagttttctggcgctttttcatctgcaagctcaataatttctacttttgcatagcttgataagcgctttaaatattcttgaataccttgttttaagtatttttcttttagctttccaatggttataatagagatattcacaggctattctcctctcctttatcccttatccacagatattatccacatatccacatgttatatccacattttgtataagaatattagttccctactacatatacagcttcattgtcacaatattcacagctttttttgtcagtggaattttctattttttcaaaaaccggcgctagctcaatctcatctactattacatccagcgctagttctgtatgttctaaacagcaatatatcttcatgtatttatcttcctttctctattcttttcattaaaaaaccacaggagtttatcccctgtggataacttttctttcacttcatttgacgcgttaattttacttctgtggatttctttttgccatcgcgatagaacgttacgttcattttatcgccaatttctttttcaatgtagaggtgtttgcgaagtgtcgcaatgtcccttactttgctgtgatctagctcaacaatcacatcatattccttcaacccagctttagcggctggcgaacctggctcgacttttagaacagcgactccgtttactacatcatgcggtaacttaagggtttcttttaaatgataccctgatacctcacttaatgatagtgtactaactccaagatacggacgtctaacttcaccatatcgttctaagtcattaataatgggcctagccatgttaattggtattgcaagaccaatgccttctactgcttcttgggcaattttcatggaattaatgcctattaattcaccatcaatattaacaagagcacccccgctattgccagggttaattgcggcatctgtttgaataacttctgattgccaatcaggatttccatcgccattcaaatcttgaggaatgacacggttaatccctgagacaactccttgtgtaacggagccagaaaattgaaggcctagcgggtttccgatagcaatcactggttcaccagctttcagcttatcagaatttccgaaggtagccacttttgtcacgtggcctgcgtcaatttcaagaactgctaagtccattaaatcatcgctgccaagaattttagccgatacccttgtaccgttactgaagctcacttcaatttcgttagcgcctttaatgacatgatagtttgtcacaatataagctttgttgccttgctttttgtaaataacacctgagcctgtcccggcatcagttcgttcatcattccaaaagctttcagagttctgaatgtttacaactcctacaactgctgcattgacttcagaaacagcttttgtgacggccgtagtgacgtcaagagatactgacttttgaatggtagaacctgtttgttcatctctattttcatccgtcatccatccgtatggcaaaatcccattcctcaccaaggctggcataagaagcagtacaataagtgcacctataattgctccaaccagagcagaagcgaaatatcctctgcggcgtttaggcggccgactatttggctcttggccttcatcataatgttccacactatcaccgaacccttcatttatcatcgtgaatgtctgcattcacgtattaaatgaagttatttttcgcttcctttctagagactatacataaacaatatcagttggtctttttggatcagtatcacataggagaatattgtcctctacattgatgtctttttgttgtaacacttgtgcaaccgacatgcgggcaatttccttcatgttattgtcttgacttaaatgcgccaaataaatgcgtttggtttgatctccaatcacatctgccattgcaagcgccgcatcttcatttgatacatgtcccacgtcgcttagaattcgtcttttaatgctccaagggtagcgccccattctcagcatttcaacatcatgattgctttcaaatacgtacatatcgctatttttaatcgtacctttcatgcggtcacttacatagccggtatccgtaataagggttaattttttagacccttgatgaaagacataaaacataggctctgcggcatcatgcgaaacgccaaaagactccacttccaattgaccaaacgatttcgtttggccaatttcaaagtgaaacttctgttccgtattaatgttgccgatcaagccatccattgcgttccacgttttttcatttgcgaaaatagggagcttatatttacgtgccagaacacctagtcctttaatatggtcactatgttcgtgagtcactaaaattcctgataaatccgggatattgcgatttacttgttgaaagagagcttccatttgctttccgctcagccctgcatcaactagtaaggaatgttctccatcacttactaaaatcgcatttcctgtgctcccactcgctagcacgctgaaatgcaggctcatttatctcactccaaatacttatttatttccttttttaatgatctgtccttcaaaggcatttacaaaataactcgtatctccatttacaacgatgtgccaagttggtgctaaaacttgagaatttagtaacggcagatcaaacgtatagtacccaaactctacttttgttacagaatctttctttttcaattcatccttcaaaaacaaattttctaatgcttttaaaggcgttaaaacatcctgctcatcatctaacgtttttacagaacctagcatcgtttgttcatacgaaataatttcatctttgtcatttaagtgagcaacgatcataccattttcattgtcaaagattttatgcttcttatattgttgaaagaatgtaactgtttttttctctttgttaacattccatagctcatactccttacctgagatcacataccgttttagaaattgacttagctttgcttcgggacttttttcaggtactgaaaaaggtttgtctaatacgcttcgaattgttttttcctcaagcagcgctgctttttgttctttaagcttttttaaatcttcatctttaaacagtttgcttttggcatttaacgacgaagcttctttcacatctgtaggcaaatgtttatattcaatgccttcactcgttaattgttcttcaacgctcgactctacaaatagagaatactgatcttcttgatgagttttaaaaatctgatagcctaagtaaatattaagaatcaagaaagtgaaaataaagatggtttttgttctattccaatccatcgttatcgcctccttccgtcggcggtgcaattcgataccacttgctattataataatagaaccaagaaggaacgagtttgacagaattagaattaaactcaaccgtcttttcaccggttttcggctgctgtgaaacttcttctagctgatagcctattgaaatatcttttaacagattcgggtcaaagttttggtgtttttcaattaattgaatcaccttttgagatgactgcagcttttctacactggaatcctgtactcttacaaaacgataaagaggacgacggtaatttaaaatctccgcatttccccatctctgatatatttcagtcatgccctgattgctgtaaactggatagttatctttataataacgatagctaatttcttttgtaatacgattccagctgttgaacctgtaattagattccgtccagcctccgtggtcattaacgaagctaaagctacggtttattaaattataatcttccattacttcggtcgtggaatttacaagattcacatattccatcacatctgtcttcgtattaacattaatcacttttgtaccttcggtgtagacatctcggtttgtagacgtttctttccgcgcatagtctgggttgttaaaaagcgcttccttatatttttcaatatctaaatgcctcatgctcgtatagtagacttcactattcatcgtgatattgttttccggaaggaagatataccgatttttgttttctttatatacaaagctcggggcatacgtacgtttcattttgtcttctaattctttgatatcatctttggccaaattcttgactgtaactgaataaatctttttttgctcataattcacaagatacacgctcacgaaaaaggaaggtgtacgcttaattttaatgagtacacggtcaaatgtttgattaggcaaagacgtttgagaaaatgaaaaaagctgttgaaatgtttttaacggtagcgcgtctggatacagcacttcaatagaattacttccatggacataatttaaaaatccatcaggagaaatagcatccgaaacgtccgtcacattcgaaaatttccactttttcatttcatttacccatttgtttacatcatcttcgtcgtgagacatgtagtgattatcgtttcgatgatagagaacttctgttggaagaatatgatcttctattttactttttgaactcacttcaacttcctgcaaatgttgattctttgaaatgaccttataagaaggctgatacgtccatatatgatacgtcataattaaactggaagcgacgagaacaactaagatggccgttttgatatgttcatatctcattcccattcgtcatcattctcactttcaattggaagagtaaagtaaatcgttgttccttttccttcctgactatctgcccaaatacgtccatcatgtgcttcaataatttccttggcaatagcaagccctaatcctgttccgcctaatttacgcgttcgtgctttatctacacgatagaagcgttcgaaaattttagctaaatttgattttggaattcccataccttggtctttaatgctcacaacaatttcatgcgtatgctgagcaattgaaaatgtaatgattccgccttcaggtgaatattttattgcattggaaataatgttatctaatacttgtgtaattttatcttgatcgatagcaacatagattgcttcatttggcaagtcgcgcacgaatgaaataccttgttcaattgtcatttcaaagcgatcaatgatgtaatgatagaacttcacaaaattgattgggtcacgactaaatcggtagtcttgactatctaacttagataattgaagcaagtcgttaacgagacgaatcattcgttctgtttccgtttgcgttacatttaaaaacgttggagctaagtccttatcttgccatgctccttctgcaagcgcatctaaataactgcgcatcgttgttaacggcgtacgcaattcatgtgaaacattcgctacaaattctcggcgatcttgatcaattttctcctgctctgtaatatcatgcaagacaatgataatcccgttaataaaaccggtctctttttgaatagcggaaatggtagctcttaaaataaagggatccgattttgtactaaagtccaaaattaatgactcttgattagcgagcaagctctcaaacgtatgcgtttcttcaagatctaatagggaaacaactggatcagacaaaaccgtttcacgtgaaacatttagcatagctgcagctggatcattaattaaaattactcttccctttcgatctgtcgcaataacgccgtccgtcatatgagctaatactgaactaagcttacggcgctccccttctgtagttgcctgtgcttcttgaagctttcttgttaagttgttgaatgtgagagctagctgaccaatttcatcatacccgtataccttagcttttctcgtaaaattccctttggccatctcaagtgcttgttttctcatttcagacattggacgagtaatcgtctgagctaaaaacacgcctaaaatagctgtaataaaaagagcaatcaccgtacctgccttaaagatctgattgatattactcatttgatcgtaaacaggctccatggaagctgttaagtaaatagcacctaagatttcttcgctagactgaatttttccatttttattggttgaatttgattgactggcacctactttatcctgtaaacgaataggctgtatcataactctgattcgctgtccgctttgatcaacaaatacattatcagagttagttcctgctaacaacgcatttgtaatcgctaaatcattagtctttttacctatgatctgttgaggatttgagttcgatgtagcaatgattcttctattttggtcaatgactcttacttcagagatgtcattcatatcatttgaagctaaattgggtcttgaagcaaaatctcgtaaaatagtctttaagtcttcctcaagagtgggtgaatcatcatcacgatttttcaccatttcttgtccaatgttatacgtcagcaagtctgtccgctcttgaagagacgttcgaaagttgttaactaattctttttctaattgtcgtgcaaaatagaccccaataatttgcatcgcaattaaaatgagcagcacataaatcaatacaaactttaagtgaatagattgcaggagccttactttcttcatctaaaattactcctgctctgggctgcgtaaataatagcctactccacgtcttgttacaatccacattggatggcttggattatcttcaattttttcacgtaatcttcgaactgttacatctaccgtacgcacatcaccaaaatagtcataaccccatacagtttgaagcaagtgttcacgcgtcatgacttgtccaatgtgcttcgctaaataatgcagcagctcaaattcacggtgagtcagttcaatcgtttctccgcgcttagacacgatataggcatctgggtgaataacaagtgctccaatcgtaatttcattcgtttcgctttcttccgttggaacagctacctgctgatgtctacgtaaattagcttttacacgtgctaataattcacgcgtactaaacggcttagttacataatcatctgcacctaattctagacctaaaactttgtcaatttcagagtcttttgctgttaacatgataattggcatatcatattttttgcgcacttctcggcaaacttccattccatctttctgaggaagcataatatctaataaaatcatttcaggctgtacttcttccactttttcaagtgcttctacgccatcataagcacaaaatacttcgtaaccttctttttgcaaattaaactttaaaatatctgcaatcggcttttcgtcatctacgactaaaatacgtttatccatgatcatcgttctcctttattagttgaagcaaaatataaaagatagtattcatactgtttgaataccgtagttttattatacttgataacccttgaaacgtcacaagttcatcctctactatacatgaagatatatgattttcaaccatctctaaatacaaaagtaatatattaccacaaaagagatacaaagcaaataacgttttcttttaaatgtaaataaaagaaaaaagcatgactttaaataaagtcatgctttttgatggctcgggacggaatcgaaccgccgacacaaggattttcagtcctttgctctaccaactgagctaccgagccaaaatggcggtcccgacgggaatcgaacccgcgatctcctgcgtgacaggcaggcatgttaaccgctacaccacgggacctcagtctatatgctatgtattaaaaatgacccgtacgggattcgaacccgtgttaccgccgtgaaagggcggtgtcttaaccgcttgaccaacgggccacgttgtaacaaaagtgagccatgaaggactcgaaccttcgaccctctgattaaaagtcagatgctctaccaactgagctaatggctcatgttatatctcttagcgacgtttattataataacatgatatttcatatgaatgcaatagtttttttaaaactttctttttattattgaacttttttaaaaaatcttgttaacaaagcaccaattataaataaaaaaggttagctctcgaggagctaaccttttttatttagctatatacaccacgtaatacatttgtttgtgtacgatctggacctacagagaaaatagataaaggaatacctgttaattgagacacgcgctctaagtagtggcgagcgttatcaggtaactcatctaatgttttcacacccgtaatatcttctgtccaacctggaagctcttcatatacaggttcgcactctgcaagtgtttttaagctagcagggaattcttccataacttcccctttataacgataagctacgcaaatctttaatgtctcaattcccgttaatacatcaattgagtttaaagataaatctgtgattccactaacgcgacgagcatgacgtacaactacactgtcgaaccaacctacacggcgaggacgaccagttgttgtaccatattcacgtcctacttcacggatttgatcaccgatttcgtttgttaattcagttgggaaagggccgtcaccaacacgagttgtatacgcttttgatacacctacaacgtgtttgattttagatggacctaccccagaaccaattgttactccacccgctactgggtttgaagatgtaacaaatggatatgttccttgatcgatatctaacataacaccttgtgcgccttcgaatagtacacgacgtccttcgtctaacgcatcatttaatactactgatgtatccacaacatattttgcaacttgttgaccatactcatagtactcatctaaaatttcttctaatgtaaagccttctacttcatacattttttcaagaaggcgattcttttcagctaagttttgtgttaattttgcttcaaatacttcacggtctagtaaatcggcaattcgaataccaacacgtgctgctttatccatataagctggtccaataccttttttcgttgtaccaatcttattttcacctttacgttcttcttcaacttcatctaattttaaatgatatggaagaatcacatgagctcggttactaatacgtaagttttctgttgttacaccgcgatcatgtaagtattttaattcttgaacaagcgcttttggatcgacaaccataccatttccaattacacacgttttgtcattataaaaaatacctgaaggaattaaatgtaacttataagtttcaccattaaacttaattgtgtgacctgcattgttcccaccttggtaacgtgcaatcacttctgcattttctgataggaagtctgtaatcttcccttttccttcatctccccattgtgttcctactacaacgactgaagacatatcttaagcacctccgcttagtaagcaacagctcactacgacataatttaaccatggataagtgtatcaatttatcacgctaaagtcaattaaatccgaacgatttaacaaaagttattacaaatatatcgtattttgcggaacgaatgcgataacaataaaataaaacctctcatattgagaggttttatgcaccaggcggcactcctgcgtcatcaaagcgccgctcgagattaacgaatttgttgtactcttttacgaaggcaagctgtacggttccaactggaccgttacgctgcttggctataataatctcgataatattttgattttctgtatctttttcataatagtcttcacgatataagaaagctacgatatcagcatcctgctcaatacttccggattcacggatatcagacatcattggccgcttatcttgtctttgctctactccacgggaaagctgtgataaggcgataacaggaacttctaattcacgagctaaagcttttaacgcacgagaaatttcagatacttcctgctgtcggttttctccgcttcgtccatttccttgaataagctgtaagtagtcaattaaaatcatcccaagcccgccttcttgcttcaagcgacgacacttagaacgaatttcacctactcgaatacccggtgtatcatcaatataaatccctgcattggacaaagatcccatcgccatcgtgagctttccccagtcatcggctgtaagcgaccctgtacgcagcctttgtgcatcaatatttccttcggcacacagcatcctcataacaagctgctgagcacccatctctaaactgaagattgctacgttctcatccgttttcgttgcaacgttttgcgcaatatttaaggcaaaagccgttttacctaccgatggacgggccgctacaatgattaaatcatttcgctggaaccctgctgtcattctatctaaatcactaaacccggttgggatacctgtaatgtcaccttttcgattgtgaagaacttcgatatcatcgtacgtttgtacaagtacatctttgatattttgaaacacaccgctgtttttacgctgtgctacttctaaaatgtttttttccgcttcatttaataaaacttctacttcgtcttcccttgcatatccttctgaagcaatatgcgttgcagtacgaattagacggcgtaaaatcgacttttcttctacgattttaccgtaatactctacgtttgcagccgttggaacagagttagctaaatcacttaaatacgatacgccgccaacttcttctaagattttttgatcagctaattcagacgttaccgttaccaaatcaaccggttcaccttggtcagaaagtttcagcatacatgtaaagattttctggtgcgatgcccggtaaaaatcttcaggtattagcagctcagatgctaaggttaaagaagaaggctctaagaaaatggcccctaatagcgcttgctctgcttcaatattctgaggcggaagacgatcagcaaaaagatcactcatatttctatgcccctcttatattctttcgtattttctttcatcataaatgttggcgcgaacaaatacaagtccgcgccaaccctttatattatttacctatttttcaatcgtacgtttatttttgttcagtcacgtgtacctttacagtagccgttacttccggatgtaatttaaccggtacatttgtgtagcctaatgcgcgaatggcatcatttaattcaattttacgcttatctactttaatgttgtgctttttctttaattcttcagcaatttgtttgcttgtgatagaaccgaataaacggccgccttcaccagattttgcttttaattcaactgttagttcttcaagagttgcttttaactctttgtttgcttgaagttctgcagctgcatctttttgctctctatttttttgtgcttctaatactttcacattaccgcctgtagcttcaacagcatacccattttttaataagaagttatgtgcataaccgtctgaaacatttttcacttcaccttttttgccttttccttttacatcttttaagaaaattactttcatgatcttctacctccatctaagtactcatcaattgcttgtttaagccgttcttcagcttcatccaaactaatgtcttgaagctgagtagcagcattcgttaagtggcctccgccttggagactttccataataacttgtacattgatatctccaagcgatctagcactaataccaattagattatcccgccgcttagaaataacaaatgaagcaaccactccgctgattgaaagcagcgtatctgcagcttgcgcaattaacacttgatcatacattttgtttggttcagctcttgaaatggcaatacctgctgtataaatctctgcatgttcaataaagcgtgctcgctgtacatattgcgtgatatcttcttttaaaaacttttgaacaagaaccgtatctgcgccttgagaacgtaaaaaagacgctgcatcaaacgtacgagatcccgtccgtaatgtaaagctttttgtatcgacaataataccggctaaaagtgctgttgcttctagcatatcaattttaaatcgttttggctggtattcaagaagctcagtaacgagttcagctgtcgaggaagcatatggctccatatagacaagaagaggatcttcgataaagtcttctcctcgtctatgatgatcaatgaccacgacattttcaatacgatttaacaacctttcttcaataacgagcgatggcttatgcgtatctactactactaaaagagtatcatcactcacaagattcaaggcttcttcaggcgtaataaatcgctcccacaggccttctttctttttaatctcttctagcattcgctgaacacctgtatcgatatgatcaggatccaatacgataaaaccgtctttctggtttacttgcgctacttttaatatcccaatagcagctcccacagcatccatatccgggtatttatgacccatgataatcacttttccactctctgtaatgagctctttcaacgcgtgagaaataactcttgcacgcacgcgcgtccgtttttccattgggtttgtcttgcccccaaagaatttcacttttccatttggctgtttaatggctacttgatctccgcctcgacctaaggctaaatccaagctagattgagctaaagcacccagctcaggtaaatcagcagcactagctccgataccaatgcttaatgtaagcggtatattttgtttagacgtctcttctcgaacttggtctaagatagaaaatttacttcgctctaaatgaattaagatttgttcattcataatcgcaataaatttctcagaagacgtacgtttaataaaaataccgtattcttgagcccagctatttaacatagaagttacttggctattcaagttacttttaacttgatcatccattccttgcgttagttcgtcataattatctaaaaagataatgcctaaacttgttcgttcttcttcatacaacttttcgatttctatttgctctgtaatatcaaagaagtacagtaagcgctcgtctcgtttaatcaccactttgaatttccgatcatgcaacgtgacaacttctgtttccacttcttgtttgatcagtggaataatactttcggctacatcgtataatgatcttcccactagtgtgtcttcaccgagacaagatgctagaaaaggattggtccattcaatttgatattcatcattaaacagcataatcccaatcggcatttccattaatgcctcttcgcctacttttttcagccgatgagacagcattgaaatataggtttcaaactcatcggacagcattcgctccattctcatgtatagaaaaagacaggctaatagtaatataaagcctatcattcctatgatccaattatgataggtcacgatacctactaaaatcagagctatactatacaatgagtaaaatggatagcgaatgacgttcttttttgtaaagacaggcatccatttcagctcctacttttttaagttccacaatatctacttttttgtgtctaattgttttcttaaattaaatcctaaatcaattatacctaagatgcgcacaatttgaaggataattggaataattaatgctaaaattgttacaacaattggaattgctttggcataccctttttgatgtgagaaatagaaaataaaagagatcccttgtaacacgactagcatttgcagtcccatcacgatgttgataatagctacgtacataaatgtaccttgttcaatattaaaagatgggaaggataaaattaatgcaatcaaataataccatagaatacttttaggaagtttaaattcacgaaaaggcgggaatgcttgcacctcataacctgttcttttaagaataggcgtagcaataagctgagagaaaaaggccagaataactccgcccataacaattaatagaggccacagatttttaaacatatcaaatgcatctctcatttggtcaatttgagattccttaacgtcttgtcctaaacttttcatcatttcaatactttgattaatcgattgatctaaagcattatttatttgctccattagattaacattaaaaacgatatttgctcctacgaacaataaaagtaaacctaaactaaatgcaaccgtgccgcctagtaaaatggtataccttttttgtttttgtcggtaaagcattcctattgctaatccaccaataccaaatacaaatgtaaaaggaagagtcaacacatttccaaataacaaagtcaataacaaccctactactaaaaataatattgcctttttccacccatgacgaacggtatacacaataaatggaacagctagcgctagttgaaaaatggttcccacaacaggtatgtatagtgaaaaaagcaacagcgccacaaacagcgctaaaagagctgctccttctgtaatatatcgaattcctttcacaacttcacctcgttgatatagactattatttattttatcgattcagttcataagaagcaactatttgacaaaagagcacctatgtaatgtaaaaagaggcagtaagggaatccttactgcctctttttgtaccgttcattattcaccagaaacatatggtaataatgccatttgacgagcgcgtttgatagcgatcgttaatttacgttggtatttagcgcttgttccagttacacgacgaggtaaaattttaccacgctctgaaacgaattttttaagcatatctacatctttgtaatcgatgtgagtgatgccgtttgctgtgaagaaacaaactttacgacgtctgttgcgtccacctttacgtccacctgccattttgatacgcctccttccgcttaaaagtttctataaaattttatactccggataatctactgcgaattaaaacggtaaatcgtcatctgaaatgtcaattgtctcgccattatttgcaaatggatcatcatcaacgcgagtataaccttgattacctgagttacggttctgattatctccaaatggagagccttgtccagatcctccagtgttagcaaagttactgcgttgcgtatccccaccgccacttttcggctctaaaaattgcacactttccgctacaacttccgttacgtatacgcgacgaccgtcttgtccttcgtaactgcgagattgtagtcgaccatcaacaccagctaaacttccttttttaaggaaattggctgcattttcagcctgacgacgccatacaacacagttgatgaagtcagcttcacgttcaccttgctgatttgtaaatgtgcggtttaccgctaaagtgaatgttgcaaccgctgctccactcggggtataacgtaattcaggatctttggttaagcgtcctacgagaattacgcgattcatcatcagaaccactccttaaggaaataaaacccaatttatttaaacgtttaattatgcttcttgtttaacaacgatatgacggataatgtcttcgttgattttcgcaagacgatcaaattcagaaactgcttctgaagtagccgccacgtcaagaatcatgtagtaaccgtcacggaaatcattgatttcgtatgctaaacgacgtttaccccattctttaacatttgcgatttcagcaccattatcagttaatacgccgttaaagcgctcaactaatgctttctttgcttcgtcatcaatgcttggacggatgatgtacattacttcatactttctcatcactgtcacctccttttggtctaacggcccgaaacgggcaaggagcaataaaatattactcacgaattaaaattatagcatactaccataggcaaagcaatacgcattgcgggctgtttcgtaaatatatgctaatattttcgccaacgacaaaagccgaaagaagatatctcctttcgggttttagtcttatacgttaaagcggaaatgcataacgtctccgtcttttacgatgtattcttttccttctaaacgtacttttccagcttcacgagctgctcccattgttttggcagctaataaatcctcatatgacaccgtttctgcgcgaataaatccgcgttcaaaatctgtatgaataatacctgcacactcaggagctttcataccttgtgtgaacgtccatgcgcgtacttcttgctcaccagctgtaaagtaagtagctaatccaagtaagtcgtacgctgcacgtacaagctgatctagacctgactgttcgatgcctagttcttcaaggaacattgctttttcttctccttcaagctcagcaatttcagattcaatgcgtgcacaaacaacaatcacttctgcaccttcacttgccgcatactcgcgcacttttgctacatattcgttagcagatgcatcggctacttcatcttcagaaacgtttgctacataaagaataggtttgattgttagcaagtgaaattgttttactaatttcatttgctcttctgtaaatgatacagcacgagctggctgatcactttcaaatgcattctttagtttctcgagaatttcgtattcatacattgcttctttatctttttgtttagccatcttttgaacacggccaatacgcttctctaccgtttctaaatcggctaaaattaactctaaattaattgtttcaatatctgaaataggatctacttttcctgaaacgtgcgtgatgttttcatcttcaaagcaacgcacaacgtgacaaatcgcatctacttctcgaatatgagataagaatttatttcccagtccttcacctttactagcaccctttacgattccagcgatatctgtaaattcaaatgctgttggaattgtttttttaggttttacaagctctgtaagtttttgaagacgatgatcaggtacttctacaatacctacgttaggatcaatcgtacagaaaggatagttcgcagattctgcgcccgcttgtgtaattgcattaaataatgttgattttccaacgttaggaagaccaacaattccagctgttaaagccatatatttattcactcctctttatatatccgaaacaagttaacctgtcacaattatagtgagtcaacttttgaaatacaagtttaataaagaacctttagtcgcaccgttaagatgcttcattttgtcccaccttacagtataaggcataaacatagaaaatgcatgaggttattcctcatgctttacaagaatttttttcattttacgtgcaaaatcacgtcttggaatcattacgctgtggccgcagccttcacatttaatacggatatccattcccattcgaatgattttccattcatttgtaccgcaaggatgaggttttttcatttccacaacgtcatttaaaccaaattctttttccgtcatcagctctctcctccttatttccctttcaacgtcgacgaatgctgtgcttcttctgtacgattatacataaccatacgaggaaatggaacttcaataccatgttcatttaaccttgtacgcacttctttacgaatcatacgagaaatatggaaatgtctcattggttttacttcgcttgtaatcctcattgtgacttcagttgcatggatattttgaacccccagcaattcaggcgttttaaccatatcttcatagcggcttggcaattcttctaagagctctaaaatcactttttctgctttttgtatgttttcttcataagaaatgcttacatcaacgaaagctacgctgttatgtaacgaaaaattagtgacctccacaatactgccattgggcaagatattaatttcgcctgtccaacttttaatctttgttgttcgcagaccaatttcttctacagttccctcaaatgttcctactcgaacataatcgccaacggagaactgatcttcaaagataataaaaaatcccgtgatgatgtctttcactaagttttgagcaccaaaccctaccgcaagccctacgattccagcaccagctagcaatcctcgaacatctactgataacgtttctaaaatcataactcccgcaacgaaataaatagcataagaaaaaacgttctgaagcaaacggaccatcgtagcttctcgtcgctcagaaatacgcagagggctatttgtgcgaacctctacaaatttatttaacgcttgctttccaattcgaattaaaaacatggaaataagcagaatcaacagaatttttatgaagccttctccaatatgtgcccacgtttcttcttgaaaaaatggttcaaatacgttcttaaaaactgacgtcaacgaattcatactacatgtagctcctatcgtaacatactctacatacgagaaagttttaatctattgtagcaagtttctacgaacttttgtagcgatttcgaaatggatataatagaacggctgttactaaaaataaattgacgattccatacattggatacaaaacggcaatcaaagtagaaaaacctaactttgtaaagggaatcattaaaagtagccagcaggctgccagtttccaaagagattgcaccttttcagtatgaaaacgcgcggttagtcctaagattcccgatacggctgttgtataaattgcaatgagcaaaacaatgctcattaaaaacagcatcgtataaggaaagtctttaagaatagcgaataatggaatttcataagaagaaagaaggcctgaaacttgaataagcgattcattataaataaaggaaagcccccctaataaaaacccgctgccaacacttgcaatataaatctcttttttgcttttaatttcctttccaattgtagataataccgcgacaagaggaagaatatttaacgccgtaaaggtaaaagcagcaggccaattatgctgaaggtgccaatcagttactccaggatgacgtaaaacaaatgtaagaaggacaccagctagtccaatcattaagattggcataacgaaagaattgatagaaagaagcccatttaatcctcttgaaaaaacaaagacgataaaagcactaagagcgccaattccccaccaataaggaacatgccacatttccaatgtcgccccgccgcccgcgatcataatcaccgtcgtcgtaaacaaataaaaaacgattaaaacatcataggccgcagcccatctctttcctattaattcaattagtactgggtaaaattgattggttcggtagcgatagctgatttgcataatcacattgcaagaaatcgcaaaaataatagaaaatagaaaaatagcaagtccgctttcttcgccaaaaaactgccatagctctctccctgaagcatacccagcgcctatcatggttcccataattaagaatatccatttacatcctgctctccacatcgattttcccccaatccatgaaatatatgtatagaatcttcaaaatcttcgtatactgttactattatgtataaggagtggaccctatgaatttaaaatctcccttctttgagaagacacaacattcaacccgcgtatttcatgatgaagaatctgctataaagaagctgagtacacagttactatctttacttccagcacagaaagacagaccaattgtttttgtatgtattggaacggaccgttcaactggggactcattgggtccattagtcggaacgaaactgaatgaaaaaaaggtttcatcttttcacatttttggaacgttagaagagcctgttcatgctgttaatttgaaagaaacgttaaaacatattcaaaagcttttcccgaatccttttattattggaattgatgcttgtttaggtcgtatgaaaagcgtaggctctgcatcacttggaataggacccgttaaaccaggagcaggagttaataaagaattgccaccagtcggggatattcatataacaggggttgtcaatgtgagcgggtttatggagtttttcgtcttgcaaaatacgaggcttcacctcgttatgtgcattgccgatttaattgcgaaaagcattgagactgtacacaacgaacgagagaaagagtttaataattcttcggtttaccaacctgtaagacattataaacaataaaaaaggttgtcctaaaactaggacaaccttttttatacagaagatttgttggtctgagaaagatcgttaaataattcaagaagacggtttaaatcttctttagagaaaaattcgatttcaatttttccttttttcttgctttgtgtaatgtgaacagaggtaccaaaacgctcacgaagctgtgtttcactttgttttataaataaatctttatcttttttagtttttgatgtttcacgtggaacggctttatttaagtgggcaatataagcctctagctgtctaacattcaattgttccttgcgtattttttcaacgactttaggtagaagagctttatttttcaaaccgactagcgtacgcccgtggcccatagacaattcattagtagaaatgagggtttgaatttcctcaggcaactgcaagaggcgaacatagttagcaatatgaggtcggctttttcccagtcgtgtagcaagttgctcctgtgtcatatcgagcttatccataagcaattgataagcggttgcttcttcaattggtgtcaaatcttcacgctgtaaattctccaacaaagctagttccatcatttgcttttctgaaaagtcttttataatgacaggaacagtagcaaggtcggcttctttagcagctctaaatcgtctttcacccgctaagatttcatagcctttaatgcttttgcgagctacaataggctgtaagatgccatgatgtaaaatggattgctttaactcattaattgcttctttattaaacgttttacgtggttgataggggttgggtctgagttcgtgaatagcaacttcctgaattgaatcatcagcctgtgcatctaagcctgaaaataaggcattaattcctttccctaatcctttcgccattataaatcacttcctttgcaagttccgtataaactgcggcccctctagatcttgcatcatataagataattggttcaccatgactaggtgcttcgctcaaacgaacatttcgaggaataatcgtttgataaacgcgatcctgaaagtacttcttcacttctgctgttacctgaagtcctaaatttgtgcgtgcgtcaagcatagtcagcaatacaccttcgatacgcagttgattattcaaatgtttttgcactaatctaacggtatttagcaattgacttaatccttcaagcgcataatattcacactgtacaggtattaaaacagaatcagctgccgttaacgcatttaatgtcagtaaaccaagagaagggggacaatcaataataacataatcaaagtgatctttcaccgtttctaaagctctcttaagtcgaacttcacgtgaaatggtggacactaattcaatttctgcgccagctaattgaatggtcgcaggaatgattgataaatttccgacagctgttgaacgcacgacgtttttggcttccatatcttccacgattacattataaatacattcatctacatctgctttatctatgccaactccactcgtagcgttaccctggggatctccgtctacaagtagaaccttttttccttgttcagctaaacaagctcctaaattaacagcggttgttgtttttccaactccgcctttttgattcgcaactgccacaattttccccatgttgtcacctactttcatttccatcccatttgtccagacagtttaattgttcattgaattttctgacgaaaaactttgataaaaaagcctcatcaaaaaagatgagggctatttctttattttttcggaatcttaatagtaaactgaaaatactcatcaaactcttcttcttccgtgttcaatgaaataccgctgtcactaaccattgtcaaggattgacgaattgtattcattgcgatgcgcgtatctttactaaacgcttttctttttgcttttggctttttaacctgcgtttctaacaatttaactactcgatcttccgtttgttttacatttaattgtttttcaataatctcagctaatacttgaagttgtttttcttgatttttgaggggaatgagcgctcttgcatgtcgctctgtaatcaatttttgtttgattgcttcttgtatttcaacaggaagctttaacaaacgaagcttgtttgcaattgtggattggccttttcctaaacgttgagctaatgcctcttgggtaagattatgtaactcaattaactttgcgtaggctagcgcttcttcgacagccgttagctcttcacgttgtaagttttctattaaagccacagaggccgtttctgtatcgttaaaatgtttcacaattgcaggaaccgtatcccatcctaagctttgtacagctctccaccggcgttctccagcaattaattcgtattcttcgccctcagtcggtcgaaccacaataggttgaataataccgtgtgtatgaatagtcagagctagctcttcaatttttgcttcattaaacacagtacgcggctggtaacgatttggaataatacttgaaaccctaatttgttttacttcatctcttaaaactttttcgacattttcatcttggacagtttcaatctctacatgaatatcctcatctttttcttttaaattaaaaaaacgtgaaaaagcagatttcatagtcccacaccaccttcaggaaaatcccgccttaaactaattcgatgttttttaaccatatcctgctttctaaacagaaaatatagagaagaaaatgtttcatatgaaacattctcttctctatctatttaatgcctactctagtggaagcttaactggggtaccaggttttctaggatattttttaggcgttttcttgattttgtctattaaaataatgtaacgttcactttgctccaaaggcaattggaaatgttcaatcgacttcacttttccgcctaatacttggaatgatttttctccattttttaattcctctggggcagaagcacctttcattgctaaaaagcgtccttgttctttaacaagcggtaagcaaaattcattaagaaccgagatacgtgccacggctcttgctgttacaagatcgaatgactcgcgaattgtttcttttttaccaaatgtttcagcccgatcatgacatagtgtgacattgtctagttcaagctcatttacaagatgcgttaaaaacgtaatacgcttttgtaacgaatcaacgattgttacatgcaaatgcgggaagcaaattttgatcggaatacttggaaatcctgctcctgcacctacatcacacatggattcaatttctgtaaagtcttgaaaaaaagcagctgaaatagaatcgtaaaaatgcttttcatacacttcaccgtgatcagtgatagcagttaaattcattttttcgttccattccactaaaacttgataatacttttcaaattgattcagctgtttagaagaaagagaaattcccttttcttctaatagctgttgaaactgttgaatattcattgagtttccctttcttcgcgcctaagagttttaatcatttgatactttagcgatgcgtccttgttcaatataaacaagcaagattgaaatatcagctgggttgactccagaaatacgtgaagcttgcgctaccgttagtggccgcacttggtttaatttttgacgtgcttctgtagctaaaccgttaattgcatcataatcaatataatcaggaatctttttgttttctaacttctttaagcgttcaacttgctgaagtgatttctgaatatatccttcgtatttcacctgaatttctacttgttcagctacttcaggatctaccgtctcatcagctggtgctaattgatgaatatgagtatatgtcatttcaggacggcgaagtaaatctgtcgcacgaatgccatcttttaattcgctgccgccagcttctttaatcagttgttgaacagcttcgttcggcttaataataaaggagaaaagacgtttcttctcttgctcgatttccgctttcttctgttcaaatttagcatagcgctcatcgctgattaatcctagttcacgaccaatttcagtaaggcgtaaatcagcgttatcatgacgaagcaataaacgatattctgcacgagacgttagcagacgatacggttcatttgttccttttgttactaaatcatccaccaatacaccgatgtaagcatcagaacgtcctaagatgacttcttcttgttccagggctcttcttcccgcgttaattccagcaagaagaccttggcctgcagcttcttcataaccagatgttccgttaatttgtccagccgtataaagatttttaattttcttcgtttcaagcgttggccataactgagtcggaacaattgcatcatattcaatagcatagcccgcacgcatcatttggactttttcaagacccggaattgtcgcaagcatttgacgctgtacgtgctcaggaagacttgttgatagtccttgaacatatacttcttgcgtatttcgtccttctggctctaagaaaatttggtggcgcggtttatcattaaagcgcacaaccttatcttcaatagatggacagtagcgtggtccagtacctttgatcatcccagaatacataggagataagtgaaggttgtcatcaataatttgatgagtttgttcacttgtatatgttaaccagcaaggcagttgatctgtaatgtactgtgttgtttcgtatgagaaagcacgaggcacatcatccccaggctgaatctctgttttgctgtaatcaatagttgagctattaacacgaggtggagttcctgttttaaaacggaccatgtccagccctaactcctctaagtgttcagaaagcttaatagccggttgttgattattaggaccgcttgaatattttagttcacctaaaataatttccccgcgtaagaatgtccctgtcgtaataacaactgttttagctttatacacagctcccgtttgagtgacaacgcccgtacatacaccgtcttctacgattaactgttctaccatgccttgcataagcgttagattttcttcattttctaacgtttttttcatttcatgctgataagcaaatttatctgcttgagctctgagtgctcgaacggctggaccttttcctgtgtttaacattctcatttgaatatgagttttatcgatatttctacccatttctccgccaagagcatcaatttcacgtacgacaataccttttgcaggaccgcctacagaagggttgcagggcataaatgccaccatgtctaagttgatggtcaacgttaacgttttagcacccatacgcgcagaagcaagtgccgcttcacaacctgcatgacctgctccaatgacaataacatcatattgtccaccttcatattgcataatagtagcctcctttaataatctattttcctaaacagaattgagagaacaactgatcaattaagctttcgtgaacagcatcaccaataatttcacctaatagttcccacgttcttgttaaatcaatttggacgatatcgattggaacaccactttcaatgcctgtgatggcctcatcgatagctcctcttgcttgcgttaaaagcgcaatatgtctcgtattagataaatatgttaaatcttgagattcaattgttcctccaaagaaaagagctgcaattgcttcttcaagctgatctactccttgttcttgaagaagcgaagtcgtcactattggatgatcaccagcaaattgctgcacttcctctagattaattttttgctcaagatctgttttattcacaatcacgataacgtccatgccttttacagcttcaaatagctttttatcttcgtccgttagttcttcattaaaattcaacacaagcaaaattaaatctgcttctttcaaatactgacgggagcgttccacaccaattcgttctacaatatcttctgtttcacgaattccggctgtatcaactaatcggagaggaactcctcgcacattgacgtactcttcgattacatctcgcgtcgttccaggaatgtctgtgacaatggcctttgcatcttgcactaaactatttagaagagaagatttccctacattaggacgtccaataataaccgtagccaatccttctcttaaaatttttccttgatgagaggtttgaagaagcttatcaatttcttggcgtacatttgaagctttttcgatcaatacttggtgagtcatttcctctacatcgtcatattctgggtagtcaatgtttacttctacatgggcaagtgtttcgagaatttcctgccgtaaatgacgtactagcttggacaaacgcccttccatttggccaatcgccatattcatcgctttatctgttttggcacgaattaaatccatgacagcttctgcttgtgacaagtctactcgaccatttaaaaatgctcgttttgtaaactcacccggctcagctaaacgggcaccatttgcaataactaattgcagcacacgattaacggatacaattcctccgtgacagttaatttcaataatgtcttctctagtaaatgtcttgggacctttcataatggaaagcatcacttcttcgacgacttgctctgtcttgggatctacgatatgaccgtagtgaatagtatgagaagctacgtctgttaatcgtttgttcgaaacgcttttaaagatacgatctgcaatcgtaatggcttcttcaccactcagacggacgatggcaatagctccttctcccattggtgtagaaatggccgcaattgtatcaaaatctagcaccaacttcacctcatttcattttataaaccttttattttaaacgatgttatatactatcatcgttaacaattttccacgaacaaaaacatctattttaaggcccgtaatttgtatgaaccaaataaatagaataccacaattcaccgatttagaacatctctaacgttcttctgttatgcacagtaagaaaaacaggcagtatgtactattttaacttatccacatgtgaataacaacgtatgtaacttgattttttgaacgctagcttgataaaagtaaacataaaaaagcactagcgcattttgctagtgcttttttccgatgggctgaaccaaaatacttctttttggttcttttccgacagagtgtgtctcaactaaagaatttttagctaacacttggtgaatcatttttctttcatgcgaaggcattggttctagttgaacagatcgattcgttttaatcgcctgatttgctatttttaatgccagtttttcgaccatttcttttcgtttttctcggtagccttctgggtttaatacaacatttaaaaattgttgactgtatcgattagctaccagttgtgtgagaagctggagcgcattaagggtttgtccatgttttccaatcaacattcccgcagaatcgctactaatctcaattatgcagtttctcgaggtttttttgacgttcgtatgaatcgaaatccccatttcacggctaacatttgtaataaaatgaaccgcttcctctacagggtcaactatttttgtaacttttacaactgcaggttttcccttaaagattcctaaaaatccttttttgcctggttcaattatttctacatttgtttgatttcgctctacttctaaagcatctaatgcttcttgaacagcagcttcaatcgtctgggccgtaattgtgatttcgttcattttttaaccccttcaatactcgcttgttttaagtctggccctttaatgaagtaggtttgaataatcataaagagatttcccactacccaataaagagataaggcggctggaaaattgattgcaaaaaccacaatcataatcggcataacccaaagcatcatagccatttgaggattttgatttgcatttccggccatcatcatcttttgctgaataaacgttgtgattcctgcgacaattggtaagataaatagcgggtcacgcgcacctaaatcaaaccataaaaagctgttgtttgcgatttctgatgttcgtgtaatcgcgtggaaaatcccaataagaatgggcatttgaattagaattgggaagcaaccagctaaaggatttactccgtaagtttggaataatgccatcgtttctttctgcaattgctgctgcgtctgggcatcttttgaactgtacttctcctttaacttctgcatttcgggctgaagtgtctgcattgctttcgtgtttctcatctgtttaatcataagcggtagaataagtaagcgaatcaggattgtgacaacgatgatcgcaactccatagcttttaaatacctccgccagatacgtaatgactaatgatagcggatacacaacatactcattccaaaaacctttactatcatctgtaataggttggttaatttccgtacaacccgctaaaacagttaatagaaagataagcgttatccctaaaaacaacttcttcttcacctgtttttcctccttctacatgttcacctttcaattctgaaagtgcgtcaaaatccattatataaggatgcggtagaaaaacaacagctattaaaggcttttcttctattgtttattaatcgttttgtctatgtgtaagtaatttgccacgcttaaagacatgctgcaagctgcttttaatttcttcatagctcattgttgcagcaggctgccttgcaattacaatataatctttgtcttgcttcaaatacggtgtgaattcaaacataatttgtttagcaaggcgcttaactcgattacgagtcacggcatttccaatctttttgcccacggagaatcctacgcggaaatgttcttgatccggtttgtctagaacatacaagacaaattggcgattcgctacggatttgccctttttaaaaactgtttgaaattcatcattcttttttatacgatatctttttttcatttttaacaactcctgccctttttcaggtcatgcttttatgtagtccctacaggaacagaggtgattttagtcttataaagcgaaaaaagaccactggcgtcagtggtctattatgctgataatacttttcttcctttacgacgacgacgagctaaaactttacgtccattcgctgagctcatacgagcgcggaaaccgtgtactttactgtgcttacgtttgtttggttggtaagttcttttcatctataaacacctcctcgaggaataactgaaaaagacagtccttgcaattataatgaaaagactaagaagatgtcaatgttatttaaaaaataaaattttcaatctcttggtttcattatctgttttactcaatcttcttcattctaatatctttataacccagttgtctatacctaatcaacaaaattcattgatttattaaagaaaaaatttttccttttcatctccttttctttctctaccagctgcgatctcatcgttactgaacaaaactacaacaataaatgttataaaaagcctcttttttattcaaattcttctcttaaacctttgtggataagttttttcgacatttttctacttttccatttcttatcgacaactcatgcacactatcttgtgttgtggaaaacttttctccacaaggtgtagtgattgtggataagtttcgaaaattcattgcatcatgccgaattctttgatattatatttttgttttcactcttaattacttttccacagttggtttttatccacaaactgtggacaacttgtggacatcatttccactatcactgtataaagttatccacaccatgtggaatctgtcgaatagtcggctttcttctataatatatatttacccacataatagcaattgtataaatataaattttttatgcataaggttttgtacaggttgtacaagggttgtacaaagcgcataaaagctagaaaaaggagggattgctcgttggaaaacattcatgatttatggaatagagctttagatcaaattgaaaaaaaattaagcaaacctagttttgaaacctggctcaaatcgacaaaagctcatgctttacaaggagacacgctcattattactgcgcctaatgattttgcacgggactggttagaatctaggtattctaatttaattgctgaaacgctttatgatcttacgggggaagagttagatgtaaaatttattattccacctaaccaggccgaggaagaattcgatattcaagctcctaaaaagaaagtcaataaagacgatggagcagaatttcctcaaagcatgctaaattcgaagtatacctttgatacatttgttatcggatctggaaatcggtttgcgcatgcagcttctttagcagtagcagaagcgccggctaaagcgtataatccgctttttatttacgggggagtaggattaggtaaaacacacttaatgcatgccataggccactatgtgttagatcataatcctgccgcgaaagtcgtgtacttatcatctgaaaaattcacaaatgagtttattaactctattcgtgacaataaagcagtagaattccgcaacaaataccgtaatgtagatgttttactgattgatgatattcaattcttagcaggtaaagagcagacacaagaagaatttttccatacgtttaatacgcttcacgaagaaagcaagcagattgtcatctcaagtgatcgaccgccgaaagaaattcctacacttgaagatcgacttcgctctcgctttgaatggggccttattacagatatcacaccaccagatttggaaacacgaattgctattttgcgtaaaaaagcaaaagcggacggcttagttattccaaatgaagttatgctttatatcgccaatcagattgattcaaatatcagagaattagaaggcgcacttattcgtgtagtagcttattcttcactaattaataaagatataaacgctgatttagcagcagaagcattaaaagatatcattcctagttcaaaacctagggttattacgattcaagacatccaacagattgttggacaagaatttaatataaaattagatgatttcaaagcgaagaaacgtacaaagtcagttgcgtttcctagacaaattgccatgtacctttctcgcgaactaacggatttttcgctacctaaaattggagaagagtttggtgggcgagaccatactactgtcatccatgctcatgaaaaaatctcaaaacttgttcaaacagatactgacctacaaaaacaaattaaagaaataagtgaatcactaaaaatataggctttttttacttgtattttgtgtataagtgagttaggattgtacacagtctgtccacatgtggataggctgtgttctcacgtttttaggggttatccacatttccacagcccctattactactactatcttaaaatataataaataataagcttttaaacctacttttaaggaggattaattattatgaaatttatcatacagaaagactatctagttcaaagcgttcaagacgttatgaaagctgtatcttctagaacaacaattccaattttaacggggattaaaattgtagcgactgaagaaggtgttaccttaacaggaagtgactccgatatctcgattgaatcgtttattccaaacgaagaagaaggaaaagaaattgttgatatccaaaaaccaggaagcgttgttctcccagctcgtttctttagtgaaatcgtaaaaaagcttcctaaagacattgtagaattagacgtccaaagtcactttttaacaatcattcgttcaggaaaagctgaatttaacttaaatggtttagatgcagaagagtatcctcatttgccacagatcgaagaaaacaacatgtttagattaccgacagacttattaaaaaacatgattcgacaaactgtctttgcggtgtccacctcagaaacacgacctatcttgacaggtgtaaactggaaggtcgatggcaaagaattaacgtgcattgccactgacagccaccgtctagctttgcgaaaagcgaccattgaaactggaaatgaagcaacgtataatgtggttattccaggtaaaagtttaagtgaattcagtaagatccttgatgattctcatgaattagtagacattgttatcacggaaaatcaagtattattcaaaacaaaacatttactatttttctcaagattattggacgggaattatcctgatacttcaagattgattccagctgatagtaaaacggatgttatattgaacgtaaaagaattcttgcaatcaattgaccgcgcttctttattagctcgtgaaggaagaaacaacgtagtaaaactatctacgctggatgagggaattgttgaaatttcttctaactctcctgaaatcggaaaagtaattgaagaggtacaaagtcagtctatctcaggagaagaattaaaaatttcttttagcgcaaaatatatgttagacgcattaaaagcgctcgaaggaacagatatcaaaattaacttcactggtgcgatgcgtccatttgtcattcgaacattagaggatgattcaatgctgcagctgattttaccagtgcgaacatattaaatctcagaaagctactagcatgccgtactagtagctttcttttctcaaggagaattatttagtaaaatagagatacaccattagaaagtgagagagtcgcatgaaaacagaagttaaaatttcaactgaatacattacgcttggccagtttttaaaactagcagacgtcattcaaacaggtggaatggtaaaatggtttttaagtgagcacgaagtatatgtaaacggggagctagaagagcgccgcggacgtaaattatatgcaaatgacgaagtggatataccggctgcaggatcatttgttgtcattacttaaagttggtgaaacgtttgtatattaaagaaattactttaacaaattaccgaaactatacgaagacaacgattccttttgaaaataaagtaaacgtcattttgggtgaaaacgcacagggtaaaacaaacgtgatggaatcgatcttcgtattatctatggctaaatctcatcgtacatccaacgataaagaattaattaaatgggactgtgagtatgcaaagctatcgggcattgtagaaaagcatagagggcctgttacactggatttagtcatctcaacaaaagggaaaaaagcaaaatataatcacattgagcagaaaaaactcagtcaatatatagggtcaattaacactgtcatgtttgctccggaggatttgaacctagttaaagggagtccgcaagtaaggcgcaaatttattgatatggagattggtcaagtttcgcctgtttacatgcatgatttaagcaggtatcaaaagattttgcagcaaagaaatcaatatttgaagcagctgcagacaaaaaaacaaacggatctttcacttttagacgtacttacgttacagttaagtgaaatggcggcgaaaatcttaaaaaaacgttttgagtttttacagttactccaacagtgggcagagcctattcataaagggatcagtcgagacttagaaacattaaaaattgagtataagaattcaattgatgtatcagaagatgcagatttgtcgaaaatgttagaagcatatcatcaaaagtttgataaaataaaaagtagagaaattgatagaggtgtcaccttagcgggaccacaccgtgatgatcttcttttctacgttaatgagaaagacgttcaaacatttggttcacaagggcaacagcggacgactgctttatcgttaaagcttgctgaaattgagttaattcatcaagaagtaggtgaatatccaatcttgcttttagacgacgtattgtctgaattagatgattttcgtcaatcacacttgctaaataccattcaaggaaaagttcagacgtttgtaacgacaacgagcattgaaggaattcatcacgagaccttagaaaaagccgctacatatcacgtagaagctggccaaattcaaaaggtcaaatagcaattgatctgtctaaaaacttttcgcaaggcaatctaactgaaatatgatatcattatagttttaagtctatatatttcaactcgtaccctcgattatgaaaattttgtgcataagtaaacaaattgcaaatacattaaaggctccgtattatttccacataatattcgaaaaacataatacaaaatgataaatacagcagtttgctgttaaaaaaaagtgtaggtgatacatttgacgatggaacaaaaagaagtacaagcatatgaagctgatcagatacaagtattagaaggattagaggctgttcgtaaacgtccggggatgtatattggatcgacgagcgcaaagggtttacatcatcttgtatgggaaattgtagataatagtattgatgaagcgctggccggctattgcgatgaaattaatgttattatcgaaaaggataatagtattacagtcaaagataacggtcgtggaattccggttggtattcaagaaaaaatgggcagacctgccgttgaagttatcttaacggttcttcatgccggaggtaaatttggcggcggcggctataaagtatccggtggattacatggtgtaggtgcctcagttgttaacgcactttctacctctttggaagtgtacgtacatcgtgatggtaaagttcattatcaaaaatatgaacgaggtgtaccggctgctgacttaaaagtagttggagaaacagataaaacaggtactgttattcaattccatccagacggtgaaatttttacagaaacgcttgaatacgattttgatacgttagctaatcgtctgcgtgagttagctttcttaaatcgcggtattaaaattacgattgaagacaaacgtgaagaagataaaagacgtgagtatcactatgaaggcggaattaagtcttacgttgaacacttaaaccgtgcaaaagaagtaattcacgaagagccgatctatattgaaggtaatcgagacaacatttctgtagaaattgctattcaatataacgatagctatacaagtaatttatattcttttgcaaacaacattcacacatatgaaggtggaacgcacgaagcaggatttaaaacagcgttaacgcgtgtaattaacgactatgcacgtaaaaacagcgtatttaaagacagtgatgccaatctaacgggtgaagatgttcgtgaaggaattacagctatcatctctattaagcacccagatccgcagtttgaaggacaaacaaaaacaaagctgggaaatagtgaagcaagaacaattactgactctgtgtttgcagaacacttagaaacgtacttgctagagaaccctattgtggcaaaaaaggtaattgaaaaaggtttaatggctgcaagagcaagaatggcagctaaaaaagctcgtgagcttacaagacgtaaaagcgcgcttgaaatctcaaacttaccgggtaaattagcagattgttcatcaaaagatccttctattagcgaactctatgtagtagagggtgactctgcgggaggatcagctaagcagggaagaagccgtcatttccaagctattttgcctttacgtggtaaaattatcaacgtagagaaagcccgtttagataaaattttatctaataacgaaattcgtacaatcattaccgctctaggaacgggtattggtgacgattttgatatctcgaaagcacgctaccataaaattgtgatcatgacagatgcagacgtggacggtgcgcatattcgtacgcttcttctaacgttcttctatcgctatatgagacagattattgagcatggatatgtgtacattgcccagccgcctctttacaaagtttcacaaggtaaaaaagtggagtacgcgtacaacgatcgtcaattagaagaggtattagcttctttccctgaaggcgcaaaaccaaaccttcagcgttacaaaggtttaggagagatgaatcctgaacaattatgggaaacaacaatggatccagagttccgtacccttcttcaagtgaacttgcaagatgcaattgaagctgatgagacatttgaaattttaatgggcgacaaagtagaaccacgccgtaatttcattgaagaaaatgctcagtacgtaaaaaatcttgatatttaaatgaacggtaataccctttatatgttttataaagggtatataaacgtcaggatagagataggttctatcctgcgtttacatatatatgaattactatactgaacttcgcgaaggaggttcttatcgatgtcagataaaccaaactctcaaataagagaagtaaatattagtcaagaaatgcgcgcatcctttttagattatgcaatgagcgtaattgtatcgcgtgctttaccggatgtaagagacggacttaagcctgtgcaccgtcgtattttatatgcaatgaatgatttaggtatgggatcggataagccatataaaaaatcagctcgtatcgtaggagaagtaattggtaagtatcacccacacggtgactcagctgtatatgaaacaatggttcgtatggcacaagattttagctatcgttatatgctaattgacggtcatggaaactttggatctgttgatggagatgccgcagcagctatgcgttatacagaagcaagaatgtcaaaagtttcgatggaactgctgcgtgacatcaataaagatacaattgattatcaagataactatgacggttctgaacgtgaaccaattgtattacctgctagatttccaaatttacttgtaaacggttcagccggaattgcggtaggtatggccacaaatattcctccgcatcagttaggggaagtcattgacggcgttttagctgtaagtcaagaccctgatatcacaattgcagagttaatggagattattccaggcccagatttcccaactgcaggacaaattcttggccgcagcggcattcgtaaagcttatgaaactggaaaaggttctattattgttcgcgcaaaagtagaaattgaagaacaaagcaatggtaaacaaactattattgttcatgaacttccataccaagtaaataaagcaaagctaattgaaaaaattgctgagctagcccgtgataagaagattgatggaattacggatttacgagatgagtctgaccgttcaggtatgcgtattgttattgaagtaagacgtgatgcaaatgcaaatgttttattaaacaacttatataagcagacatctcttcaaacaagttttggtattaatacccttgcattagtagatggacagccaaaagtattgaacttgaagcaatgtctacagtactacttagaccatcaggtagtggttattcgccgtcgtactgaatttgaacttcgaaaagcagaagcacgtgcgcatattttagaaggtttaaagattgctcttgataatttagatgctgttattgctttaattagaggttctcaaacaacagatattgcacgtgaaggattaatgacgcagttttcgttatctgaaaaacaagcgcaagctattttggatatgcgcctacagcgtttaacaggattagagcgagagaagattgaagcagaatatcaatctttattagcgctaattgctgaattaaaagctattttagcagatgaagaaaaagtattagaaattattagagaagaactaatagaagtaaaagaaagattcaatgacggccgtcgaacagaaatcgtaagcggaggagctgaaattatcgaagacgaggatctgattcctcgccaagatattgttattagcttaacgcacaacggctatattaaacgtttgcctgtttctacgtataagagtcagcgaagaggcggaagaggtattcaaggaatgaatacaaacgaagatgattttgttgaacatcttctaacaacttctactcatgatacgattctcttctttacaaataagggaaaagtttaccgtacgaaaggatacgaaattccagagtacggaagaacggctaaaggaatacctattattaacttgttagaagtagacaagggtgagtgggtaaacgccatcattcgcgtcgatgaatttgtagacgattggtatctattctttactacaaaacaaggaatttctaagcgtacacctttatcttcttttgagaacattcgaaatagcggacttatcgccttgaatttaagagaagaagatgaattgatttctgttaaattgacagatggtaagcgcgatatggttattggaacgaagaagggtatgttaattcgttttaatgaaaatgatgttcgttcaatgggacgtacagctactggagttaaagggatcactctcgattcagaagatgaagtaattggtatggagattctcgaagaacaatcagatgtcttaatcattacgaaaaatggttacggaaaacgtacgccgattgaagaatatcgtgtacaaacaagaggcggtaaaggtttaagaacatgtaatatcactgataaaaatggtgatgttgtcgcactgaaatgtgtatctcaagaagaagatattatgcttatcacagtaagcggcgttcttatccgtgtttctgtttcagatatttcacaaatgggccgtaacacacaaggtgtcaaagtcatccgtttaggagacgaagagtttgtttcaacggttgcaaaagtacaaacttcagaagatgaagacgaaattttagatgaattagatgaacatgaagagacagatataataattgaagctgaagaaacagaagaataaaaaaaagcccctgaaaaagcaggggctttttttatgtaaaaaaaccttgccataggcttttcattttggtaatatataaaaagtcagcaaaacatatatgagttttttagtagttttaaaaaagttatataaaagtgttgacaatgattcttataaagtgttattatataggagtcgctttaagacaagagttctttgaaaactgaacgaaatagtaaacgtcaacgttaatttttattttttaaattgagcaagtcaaacatttcttcggagagtttgatcctggctcaggatgaacgctggcggcgtgcctaatacatgcaagtcgagcgaactgattagaagcttgcttctatgacgttagcggcggaagtaaccgtaaggagctagccgcctaaggtgggacagatgattggggtgaagtcgtaacaaggtagccgtatcggaaggtgcggctggatcatctcctttctaaggatttttacatgacgtacgtttcgtttcgttcagttttgagagaattctctctatcatatatatgggcctatagctcagctggttagagcgcacgcctgataagcgtgaggtcggtggttcgagtccacttaggcccaccatatatatttaaacgaatggggccttagctcagctgggagagcgcctgccttgcacgcaggaggtcagcggttcgatcccgctaggctccaccaattgttctttgaaaactagataacagtaattgctgaggaaaagtgaaacttttctttaatcaaaccaataaataacacaacaatatgttgtaccatttattcgctaatggttaagttagaaagggcgnnnnnnnnnnnnnnnnnnnnnnnnnnnnnnnnnnnnnnnnnnnnnnnnnnnnnnnnnnnnnnnnnnnnnnnnnnnnnnnnnnnnnnnnnnnnnnnnnnnncctccccgccgtttgagtaatggggggacgcagtaggatagggtaagcgcgctgctggatatgcgcgttcaagcagttaggctgatgagtaggcaaatccgctcatcatgaaggctgagctgtgatgacgagggaattatagtaccgaagttcctgattccacactgccaagaaaagcctctagcgaggcgggagggttgatattcctgtaccacctccccgccgtttgagtaatggggggacgcagtaggatagggtaagcgcgctgctggatatgcgcgttcaagcagttaggctgatgagtaggcaaatccgctcatcatgaannnnnnnnnnnnnnnnnnnnnnnnnnnnnnnnnnnnnnnnnnnnnnnnnnnnnnnnnnnnnnnnnnnnnnnnnnnnnnnnnnnnnnnnnnnnnnnnnnnngatattcctgtaccacctccccgccgtttgagtaatggggggacgcagtaggatagggtaagcgcgctgctggatatgcgcgttcaagcagttaggctgatgagtaggcaaatccgctcatcatgaaggctgagctgtgatgnnnnnnnnnnnnnnnnnnnnnnnnnnnnnnnnnnnnnnnnnnnnnnnnnnnnnnnnnnnnnnnnnnnnnnnnnnnnnnnnnnnnnnnnnnnnnnnnnnnncaagcagttaggctgatgagtaggcaaatccgctcatcatgaaggctgagctgtgatgacgagggaattatagtaccgaagttcctgattccacactgccaagaaaagcctctagcgaggcgggaggggcccgtaccgcaaaccgacacaggtaggcgaggagagaatcaagatgagatttcccatagcgcaagctagtaagatccctgaaagatgatcaggttgataggtcagaggtggaagcgtggcgacatgtgtagctgactgatactaatcgatcgaggacttaaccaaacttttaaaagcgtaagctttactcagcaaactgttacctagttttgagagagcaatctcttgtctggtggcgatagcgaagaggtcacacccgttcccataccgaacacggaagttaagctctttagcgccaatggtagttgggactttgtccctgtgagagtaggacgttgccaggcacttgaaaaagactagctattttagctagtctttttttgtatgttcatttaagtaacaagaaattaagtaaggaatcttttgagccgtaacttcaaggaacctcaagataaatgggtaatctttcgaagagtatgtatgcaataattcataccaccactctgtttcataacgtgaaatcatacttaaattataaagtaataagtaatgtgccaacatctcagggaaatataagcagctatctttttccaaaggtgcatgcagcgtgttattttggaaattgtacataaaaggtgaacaattatataaacagcttgaaggatcaagaatacatacctgatcttctgacagagacaatgataggtgggaacgctcttttaaaaaagagtagagcctttcgtgattcatatgataacaccgtgtaacttgttcaggaatagacaaagaggtagctggaagcgacccaatagttgttaaatgggaaaatgatccagttcctaaatttaaaaataatgtatctaattccggtacgcacgacaacagataattcattgtatatttactaccttccagttgtttcacatgaaacaattcttctcctacttgtgaaaacaaaccgcttttttggatcttaacttcatcatctaaaaaatcataactttgtttttttctttttcgtgttgatactccatgtgctaacaccgctgtattttctggatatactgggttttgcgttaacaaacaggcttttaacagctgtgacattccataaaataataaaactggttgaactgatacaggagattgtgccgcaacttgataataatttttactgtgttccagataataaataaaggggtaactgtttttaaagctatgttgctctgcatcgctataattcaatttttgatagcgcttttttaaaaagtcttgtacaaaaggaacggagaaaaataaattgtaggacgtccaaacatcattaaatttatgcaattaaatcaccttttctttttattagaattatctgatatctagtgaagttattgacaggtacatatctgcttgttaatctactaataatattctgtcgtttaaaggaggattctataatgtgggaaagcaaattttctaaagaaggcttaacatttgatgacgttttactggtgccagcaaaatctgaggtactacctaaagacgttgatatgagtgttgaactaacaaaaacattaaaattaaaggtgccgttcatcagtgcaggaatggatacagttacagaagctgaaatggctattgcgatggctagacaaggtggtttaggtatcattcacaaaaacatgtcgattgaacagcaagcagaacaagttgataaagtaaaacgttctgaaagtggtgttatcacggatcctttctttttaactcctgaaaaccaagtatttgctgctgaacatttaatgggcaaatatcgtatctcaggtgtgccgattgtcaacaacgaagaagaacaaaaactagttggaatccttacaaaccgcgacttgcgttttatccaagattattcaatgcaaattgctgatgtaatgacaaaagaagaattggttactgccccagtaggaacgactttagaagaagcagagaaaattctacagcaatacaaaattgaaaagttacctcttgtagatgacaatggcgtattaaaaggccttatcacaattaaagacattgaaaaagtaattgagtttccaaatgcagctaaagatcaacaaggtcgattattagttggagcagctgttggcgtaacagctgattcaaacgttcgtatcgaaaaattagtacaagctggcgttgatgttatcgttattgatacagcgcatggacattcacaaggcgttttagatacggtaagcagcattcgcgaggcatatccagagttaaatattattgctggtaacgtagcaactgctgaaggtacaaaagcattaattgaagcaggagcaaacgtagtaaaagtaggaattggacctggttcaatttgtacaactcgtgttgtagctggtgtaggcgttccacaaattacagcagtatatgactgtgcaactgaagctcgtaagcacggtgtagctattatcgcagatggcggtattaaatactctggagatattgtaaaagcacttgcggctggtggacatacagtaatgctaggaagccttctagcagggacgacagaaagtcctggagaaacagaaatctaccagggtagacgctttaaagtgtaccgtggaatgggctctgtaggagctatggaaaaaggaagtaaagatcgatacttccaagaagataataaaaaattagtcccagaaggtatcgaaggacgtttgccttacaaaggacctgtagcagatactttatatcaaatgattggcggtttacgcgcaggaatgggttactgtggttcagctaacttagaagcgttacgtgaacaggcacaattcattcgtatgactggagcaggtttaagagaaagccacccacatgatgtacaaatcacaaaagaatctcctaactattctatgagataatcatgaatgctaaaaaacacgtttccctattagggaaacgtgttttttaagtcatggatcatgaatgtaacagtacttctttatctatttttttaaattttaatatgataaaattacatttatgtgagtttacgtttggagggtatagagtgagaaacgcagtacagaaacaattaatttgtgtcattgctgttatgttaatggccagcgtattttttgtctctacacaagcatcagctgctcctaaaacagatgatattggcgttgaagcagatgcagcgatcttagtagaggcaagtacggggaaagtattatacgggaaaaatgcggatgctttattaggtattgcaagcatgacaaaaatgatgacggaatacctagtattagaatccataaaagataagaaattatcttgggatcaacgtgtgccagttagtaaatatgcagctaaaatttctcaggattatggattatcgaatgtaccgttaattgaaaaccaaaaatacacggtgaaagaattatatgatgccatggctatttactcagctaatggagctgcaattgctttagctgaagctgtcagtgattctgaagaaaactttattaagttaatgaacgaaacggcaaaaagattaaatatgggtgaatcaaaatttgtcaattctacaggtctttctaattctctgttaaaaggaatgtatccaaaaggaacgaagaaagaagatgagaaccttctatcggctcgggcagttgctacccttgcttatcacttaattcatgattatccagaatctttggaagtagctaaaactccttctaagatgtttagacaagggcaacaaggcgaaacaaaaatgaacaattggaataagatgctcccaggtttttcagctgcctacagcggcgtagacggtttaaaaactggccatacagattttgcaggtcaatgtttcactgggactgcagagcgtaacggggtaagatacataacagttgtaatgaatgctaaggaaaacggcaagtctacggaagctgctcgtttttcccaaacaaaaaagatattggattatgcttttagtcattttcagttaaaagaagtagtgcctgctaacggcgagattaaagggcatgaaacaattgatgttgctaaaggaaaatcaaaagaagcttccgtttctccaaagaattcggtaaaaattattaccaaaaaaggtcaaaaagatcatactaaaatcaactttaagttaaacgataaagttatgaacgatcaaaaagttgttgctcctattaaaaaaggagaaacagttgcttatgtgagtgcaacaaacagcaatcttaaagatttaggctatgtaggaggtcaaactacagatagcatgacgccggttatgacaaacgaatctgttgaaaaagctggatggttctctctcgctatccgcagtattggcaacttcttcagcgatatttggatgaatgctgcaaatacagtgaataactggttttaatgataactcaagagaaagaagagatactacaagagagtatctcttttttttattttagatttgtttgtatataatctataaattagataggaattttccgaaaaatggggtaaaatagacactaagttttgaattttgtatatacactaaaaattattgtgaaacacttgatacaggaggaagacaaacatgaataacattacaggtactgatcgtgtaaaacggggaatggcggaaatgcaaaaaggtggcgttatcatggacgtgatcaatgcagagcaagcaaaaattgcagaagcagcaggcgctgttgccgttatggcattagagcgtgttccagctgatatccgtgcagcaggcggcgtgtctcgtatggcagacccaacaattgttgaagaagtgatgaatgctgtgtccattccagttatggcaaaagctcgtattggccatattgttgaagcacgcgtgctagaagcgatgggtgtagactacatcgatgaaagtgaagtgttgactccagctgatgaggagtttcatttaaataaaaatacatttacggttccatttgtgtgcggttgccgtgatcttggcgaagcatctcgtcgtattgctgaaggagctgcaatgcttcgtacaaagggcgaaccagggacagggaacatcgtggaagcagtacgtcatatgcgtcaagtaaacgctcaagtacgtaaagttgtgggcatggacgaagatgagttaatgacagaagcaaaactattaggcgcaccttatgagttattactgcaaattaaacgtgaaggtcgtttaccagttgtaaactttgcagcaggcggtgtagcaacaccagcagatgcagcgttaatgatgcagcttggagcagacggcgtgttcgttggatcaggaatctttaaatcagacaaccctgaaaagtttgcacgtgcaatcgtggaagcaacaacacattatcaagactatgaactgattgcaaacttatcaaaagggttaggaagtgcaatgaaagggattgaaatttcatcattattaccagaaaaccgcatgcaagagcgtggatggtaatttaaagggagttttgacaaaatggtaaaagtaggcgtgttaggattacaaggtgcctttcgcgagcatgcacaagcattagaagcagcaggcgctgaagccattatcataaaaaaagttgaacagctaaacgaaatagatggtttaatcctaccgggcggggaaagcacagcgatgcgtcgtctgattgacaaatatgactttatggaacctcttcgccagtttgcacaagcaggtaaaccggtatttggtacgtgtgcgggtttaattttactcgcaggacaagtcgttgaccgtgaagagccccatttaggtgttatggatattacggtagctcgaaactcgtttgggcgtcaacgggatagctttgaagctgccttaaatattaaagatatcggtgaaggttttataggcgtatttatccgtgctccgcatattgtagaagtaggagaaaacgttgaagtcttagctatgcataacgaccgaatcgttgcggcaagacaaggtcaattcttgggatgttcgtttcatccagaattgacagatgatgcccgcatggcgcagtattttgtagcaatggttgaagaagcttcaaaaaaacctgtataaatgaattgcatcttgtaaagacttgtagtacattatgattaataaaaatgatattggtataaagcgttgataggaaatagtaataagatttttgatttcaagagagtcgatggctggtgtgaatcgataatcaattcttatgaatccgtcctggagcaagctgtcgaaaaagtagtaggcagtttcggttcatccgttatctggtttaagaggaaggcttattttagctttcaattagggtggcaacgcgggtaaactctcgtccctttcatggggatgagagtttttattttgcccttttatactaaaggaggtactaagtatgttagatttaaaatttttacgtgctaattttaatgaagtaaaagaaaagctcaagtttcgtggtgaggacttaacggacttaggtcgctttgaagatttagatgcaaaacgccgtgagctaattgctcaaacagaagagttaaaaagcaagcgaaatgaagtatcacagcaaattgcacaattgaagcgtgaaaaacaagatgctgatcatttaatcgttgaaatgcgtgaagtaggagatcgcgtaaagcaattggatgaagagcttcgcagcgttgaagaagaattagaactattgctgctttcaattcctaacgttccacatgaaagtacgcctgtaggtgaaactgaagatgataacgtagaagttcgcaaatggggagaaattaaacaatttgattttgaaccaaaaccgcattgggatttaggaacagatttaaatattttagattttgaaagagcttcgaaagtaacgggaagccgctttgtcttttataaagggttaggtgcaagattagaacgcgctcttattaactttatgatggatttacatatggatgagcatggttatgaagaaatccttcctccatatatggtgaatcgcacaagcatgacaggaacagggcagcttcctaaatttgaagaagatgcattcaagattaaagaagaagattatttcttaattcctacagctgaagtaccagttacaaatttacatcgtgatgaaattttaagcggagatcagcttccaattgcttatacagcgtatagtgcttgcttccgctctgaagcaggctctgcaggaagagatacacgtggtcttattcgtcagcatcagtttaataaagtagaactcgttcgctttgttaagccagaagattcttatgatgaattagaaaaattaacgggccatgctgaaaaggttcttcaactattaggtttaccttaccgagttctaagcatgtgtacagctgacttaggtttcacagcagccaaaaagtatgatattgaagtttggattccaagttatgaaacgtatcgtgaaatttcttcttgttcaaactttgaaagcttccaagctcgtcgtgctaatattcgcttccgccgtgatacaaaagcaaaaccagaacatgttcatacactaaacggttctggcttagcaattggccgtacggtagctgcaattttagaaaactaccagcaggaagatggatcaattcaaattccagaagtgctgcgtccatatatgggaaataaagaatttatctctaaataaaagtagaagatgttcattaagaattaattcttaatgaacatcttttttaaaaaaatcaataaaagggttgacttcattatttgtatatgataaattaatacttgtcgatacggaggaatacccaagtccggctgaagggatcggtcttgaaaaccgacaggggtgttaaagcccgcgggggttcgaatccctcttcctccgccatatttgacttataatgcaattaacatagcgcgataaattggagattggaaaaccgttacttataagtaacggttttttatttgttaaaaatgccgctttatctattaaagcggcatttttttatagatgacgacgttttagcttttcattatgttgtaaaaagcgagccactttttcaacaattgattcaattgaatccggatccttgataaggtcgtattctctaatatctaaacgaagaatagggcaagccgtaaagttattaatccagtcttcgtatcgggcgtgcatctctttccaataatcaagaggcgtttgctgttccattggtcgccctctttcttgaatgcgatctacaatatcttcgaagctgccttccaaataaatgagcagatccggatgaggaaaatacggagtcataaccattgcatcgaacaagcttgtatatgtttcatagtctactttagacatcgttcctttttcaaaatgcatcttagcaaagataccggtatcttcgtaaatggatctgtcttggatgaagccgccgccatactcgaaaattttcttttgttctttaaagcgttccgctagaaaatatacctgtaggtggaagctccaacgttcaaaatctccataaaatttgtccaggtaagggttggaatctactttttcaaacgatgtgcgaaattggagagcatcagccaatgattgagtcattgtagatttcccaactccaactgtacccgctatcgtcaacacagcatcattaggaatgttgtatttcgatcgtaagtttaccattacatactcctttttaacatactttcttgaacctctgataagattctatttaagtgttgtttattttgtacaaaatctatttcatcaccgtcataacgtaaaatggttacatcaggattattttgttcaaacgccgacatagccttttcataatcatcacttagcctcgcaaggtagtgaggatcgatgtttcgttcaatttctcttccgcgcattttaatccgctttaacaaggtatctaaactggcatttaaataaataataatgttcggagctggcatatcagccgttaagatgtggaagatttgtacatattttttatactgttcatcttttaacgtttgctcagcaaaaatcatgtttttcataatatgataatctgctacaacaggttttttataagataagaaccctttttgaatatcctccaactgcttatatcgattacatagaaaaaacatttcggtttgaaaactccactcgttgatattttcataaaatttcccgagaaatggattttcatctacgatttcttttaaaatttcgaattgaaatgcttgtgcaatctctttagctagagaggtttttccgacaccgatgggtccttctactgaaataaaaggtgtgccttgcattcatttgcctccttcatgaccactcgttcaaaaaaaacagacaaaaaatattttaacatagagaaggagaataaggggaaaagaaatttctttcagtaagaagaataacaaaaagcctactgttcacagtaagctttccctatttatggttgtgtcactctttttgtaattttgaagttgtcttcaatcaagagccagttttgcgggaaatctaagcctagtttccagtaggccattcctctaagttttaattctttgattaaatcaaacttggcctgaatagacctagcgtcttcaaaccatacttcgtgggtgcgctgctgttcatctttataccggaagaaaggagcttgtgctttattgtcgtattgaatcgctactttatagcgagctgccaactcaatagctcgttgaggactaatggccttggcatattctcctcctggtttgtaaggaagtgtccaatcgtaaccgtataggttttgacccatgataatttttgaactaggtatttcagatactgcatattctaaaacatcacgtacgggaccaataggagagacggccataggaggcccaccgctatatccccattcgtatgtcatcggaacaacgaagttagcaatctctccaatggctttataatcatgtgcttcataccatttgcctttttgatctcgacttgttttcggagctaaagcgacagacataagaagttgctcatcttgaagacgcttttttgctttctgtaaaaatgcaatataggcttctttatctgccggacgcaaaaattcgaagtcaaagtgaatgtctctgaaattttgttctttcgctgtttttacaatattatttaaaagcgtatcttgaacgtctttattagttaaaattgctcggccgacttcgtcactgaatgcgccgttttcaatattagccaataccattaagaaaatgacgtcattttctttagcaatagaacctaaattgttaagtggaggcgcctttagagaaccgtctttttgcacttcaaagttcgccggcccgagataagtaaggtattttgcattttgattaatcattttctctgtttgaggagtgatttttcgattgcttgtttcaacataccctaaaaactcaccgtttcttttgttgggggaaggaggaattaagatgcggcggccaggggttaagggtgctgtaactgaaacattgttcgcattggcaatagcctgatagctaacgcctaattttcttcctatcttccatatagtgtccccggcttttactgtgtagtaagtaccgttgattggaataaccatagattgcccgatgacgagttgatttggattaggtaattcatttgctcttataattttccctgcgtcaatgcggaactgttttgcaatactatatatactgtcacctgctttaacagtgtaaatttgcataataaaaagcctccatttcatatgacttacttccatcatatgagaaggctttttacttaattcatcaactcggtatgtttgcaaatatgagcatttaatacattatgcatcattctcaaagcaaaggtattgtcttcatctgcgtttgaagcaatacaatcttcaggtacaattaagttatactcacgcatataagcatcgttagctgaaaaaagcacgcatatatttcccgcaattcctgttaaaataagtgtatgaacatcgagctgtgatagcaaaatatttaaagctgttccatagaagatagaatgctttggtttaattaaaaagtaatcagcgttttgtggtgaaatgtgatgtagaacgggtgagcttatctcatttgtgcagtgtgttaaaatggtttctaagtttgcttgccatagcttatagtggtcattgacataaatgatagggatatgttgagacgaggcatattgttttaatttggaaatattttgagcaattgttaaagatttttcagcaagtattttgccgtttttaaattgaaaatcgtttagcatatcaataataattaaagcagttttagcgttcttcacacaaggtctctccttttcctgatgtacatagtaaatagtttgactcagaaaaaatataatatgtaaggttggataaaaagtgttaaatgatgaaaagtatatgaggttggcaattgatgaagcattaaaagccaaagataaattagaggttcccattggagcagttattgttcaaaatgatgaggtggttgcttcagcttataacttacgagaaacagaacagcgatcagttgctcatgcggaacttttagcaattgatgaagcatgtaagaaactaagaacatggagattggaagacgctacattatatgtcaccttagaaccatgtccgatgtgtgcaggtgctattgtattatcaagagtgaaaagagttgtgtttggcgcttatgatcctaaaggtggctgcgcgggaacattgttaaatttattagagtttgaaaagtttaatcatcaagcagaagtagtaggaggtatgctagaaaaagaatgcgggagcctcttaacgaccttttttcgtgagttgcgtcaacgaaaaaagtctggaaaatagcgctaaaaaagtaagttttctatagcggttgcatttttgaatgaaaagacgtatacttgtaaatgcatcaacttgatgcccaaactattggtttcaactttgccgtgctaagcggggaggtagcggtgccctgtactcgcaatccgctctagcgaggccgaattccttcttgaggttagctcatcttagggcctgccttaagtaagtggtgttgacgtttgggtcctatgcaatgggaatctgtgaaccctgtcaggtccggaaggaagcagcagtaagcagaacctctcatgtgccatggggtcgcctgaaccgagctaactgcttaagtaacgcctggggtggctaatcgacggaaggtgcacggcagttatatacataagtttagtctactctgttggagtaggctttttattttatctctcactattttgaaaaaaaacctcataatacgctataatgataactaatgaattatattaaaaggagaggatgtagtggcatatcaggctctgtaccgtgtataccgtcctcaaagctttaacgacgtagtcggtcaacaacatattatcaaaacacttcaaaatgcccttgtccaagagaaattttcgcatgcgtatttattttctgggcctcgagggacaggaaagacaacagctgctaaaattttagcgaaagccgttaactgtgaaaaagcacccattgctgaaccctgtaatgaatgtgcaacttgtcggggaattactgatggttccatttctgatgtaattgaaattgatgcagcttctaataatggagtcgatgaaattcgagatatccgtgataaagtaaaatatgcacctagtgctgttcgatacaaagtgtatattattgatgaggttcatatgctttcaattggagcttttaacgctttgttaaaaacgttagaagaacctcctgcacatgttatctttattttagctacaacagagccgcataaaattccattaacgattatctctagatgtcagcgctttgatttcaaacgcatttcgccagaagatatcgtatatcgaatgaaggaagtattaggttctgaagagctagaagtaagcgaggatgctctttacgaaattgcgaaagcttcagaaggcggcatgcgtgatgcacttagtcttttagaccaatctatctcgtatagtacggataaggtgagcttggaggatgttctatccataacaggagcagtatcacagtcttttattgtgaagatcgtccaagctatctttaataaaaacatcgtagaagcgctagactctgttgaaagtttgattaaaaacggaaaagatccagcgaggtttgtagaggacctcatcttctattatcgtgatgttctgctttatcaagcttctgaagaaaatgcatatttacttgaaaaagcagcggttaacgaagagtttaaagaactcagttcaaaaatggatagtgcttttatttataaagtcattgctgaattgaaccaaactcagcaagagatgaaatggagtaatcatcctcgagtgctacttgaagtagctttagtaaaattagctcaaagttctacaaatcaagagagtgctcttccctatcaagacattttgcaaaaaatgaatcaaatggaagcagaactgcagcagttaaaagaaaaaggcattcaagttgatcatacagctcaggcagtgcaaacagagaaaaaacagacaagacagtccagaagtcagtacaagacgcctgttgggaaggtaaatgaagttctaaaaaatgccactcggcagaatttagaaacaattaagcgatcttgggcgcaggtgttggacacattgaaacaacaaaataaagcttcacatgcagcgttgttatctaacagtgaaccggttgcgtcttcagatcaatcatttatacttaaattcaaatatgaaattcattgcaaaatggcttctgaaaataacaacaatgtacgtgataatttagagaatatcttatatactttaattggcagcaagcgtgaaatggttgcaattccagaaagcgaatgggataaagtaagagaagagtttcttcaaggacagcagcaaagtgatgggtcatccggtcaaccacaggaggaagaccctgtggttgcagaagcgaaaaagctatttggagaagacttaatcgaaattcaagagtaaatttaggaggaatgttcatatgatgaaaggcatgggcaatatgcaaaaaatgatgaaacaaatgcaaaaaatgcaaaaagatatgcaaaaagcgcaggaagagttagctgaaaaaactgttgaaggtacagctggcggcggaatggtaacagttgtagttaacggtcagaaacaagtaattgatgtaaatattaaagaggatgtagtagatcctgaagatattgaaatgctacaagatttagtactagcagcaacaaatgacgcattaaaacaaatggacgatttaacaaataacacaatgggtcaatttacaaaaggtttaaatattccaggactttaataaggtggttgccacgtgcattatccagaaccaatatcaaagcttatagatagttttatgaagttacccggcattggtccaaaaacagctgttcgcttagcgttctttgttttatctatgaaagaagatacagtattagattttgcaaaagcattagtcaatgcgaagcgaaatttaacctattgttcagtttgcggacatatcacagatcaagatccttgttacatttgtcaagatcagcgcagagagcgaaatgtggtatgtgtcgtgcaagaccctaaggatgtcattgcaatggagaaaatgaaagaatataacggcttgtatcatgtcctgcatggcgcaatttcacctatggaaggaatagggcctgaagatatcaaagtaccagagttattaaaaagacttcaagatgatgagattcaagaagtgattttagccactaacccgaatatagagggcgaagctacggctatgtatatctctaggctcttaaagccgacaggaattaaaattactagaattgctcatgggttacccgttggaggagatcttgagtacgcagatgaagtaacattatctaaagcactagaaggtagaagagaagtataacgaggtacttgcatatgttttttaaaagaaaaggttggttacgcaaagagtacgatgatgaatttgtgaagacttttatgcaagtaaagcaggaatggagtcacaaaacttcaatggtagaaagaagtgtagatccttcagaagaggtaatggtagatattcgattagccaaaatgaagtatctttttctattaaaagaagccaagcatcgaaatatttcaattaacaggatgtcatagaggcatcctgttttgttgtctttataaaataaggatttccctccgggaagtagtgctttttttgaatgcttggacatacatataagataacttatctgctttaagaaggaggcaacatgctaaatcatcccattgtagttgtgtcttttttaatagggctaatcattctactcttagtaacaggtggtgttgaaaaaatgcttcgagtcattggaaatttatcgatcaagcttattattggcgttctgctgcttttctttattaacatctttggcgtacagtttggtattcatatccctattaatttccccacagccattgtttcagctattttaggtattccaggcatagctgccttacttgttattaataatttcatattataatttggaggaatatccaaaataaaagttttctggaatcttttcgagaaaacttttatttttttttgaaaaagttgttgaccaacaagttaacagatgttatatttatatacgtcgctaagacaacaacaaaaaataactcgaaaataacttaatgaaaaaagttgttgacaagttatccttgaggtggtaagataagaaagtcgccttgagacaagagttctttgaaaactgaacgaaatagtaaacgtcaacgttaatttttattttttaaattgagcaagtcaaacatttcttcggagagtttgatcctggctcaggatgaacgctggcggcgtgcctaatacatgcaagtcgagcgaactgattagaagcttgcttctatgacgttagcggcggannnnnnnnnnnnnnnnnnnnnnnnnnnnnnnnnnnnnnnnnnnnnnnnnnnnnnnnnnnnnnnnnnnnnnnnnnnnnnnnnnnnnnnnnnnnnnnnnnnntagtaagatccctgaaagatgatcaggttgataggtcagaggtggaagcgtggcgacatgtgtagctgactgatactaatcgatcgaggacttaaccaaacttttaaaagcgtaagctttactcagcgaactgttatctagttttgagagagcaatctcttgtctggtggcgatagcgaagaggtcacacccgttcccataccgaacacggaagttaagctctttagcgnnnnnnnnnnnnnnnnnnnnnnnnnnnnnnnnnnnnnnnnnnnnnnnnnnnnnnnnnnnnnnnnnnnnnnnnnnnnnnnnnnnnnnnnnnnnnnnnnnnnttacaaatctataaaaacggaaataaaacaataatgattcatttccgtttttattaaatttaaaacagtttagagttgtgtttgtaaaagaataaatgaattatcttttaaattattgattttttgcacgttgatgttttcaataattttacagtattttcattataattaagctataaaattaatcttaaaatgataattaaagcaatcataagtaaattccgatttagatatttttatgaaattgataaataattaaataaagacattattgttttctattatttattagttgacaaaataaaaaactaggaatgatttttcctagtttgagaatagcttttgccataatgtcttcttttgattttgttctttaatcaactctttttgagtatgagtaaatgcatttaaaaggtcttcatctctttgttttaataactcttttagattagtatttatcagttcttcaaaattctgtttgttttgatttagctcctgttcagctgaattatcttttagcgtttcttgagtttttctaatgttttcaagaagaactttatcacgtttttttaggctgttttctatgtatgcttctaagtctttattttctgtttttacttcaatcatttgctgctttgttgctgcaatttctttatttgcaatagctaactctttttgagtagaaataagttcctttgttagaagctccaatttttctgaaagaatcctgttaaattctatttgttggttctgaccttcaattaggtgatctatcttcttttctaaaatagaccgttctacgtggtcattaatagtcatttcttcaccattacgccactgtttcacttgatcccaggaccaaccttgctcatgaattttcttctttatactgttaagtgtctctagattctcttttgtaaaccttctatgaccttttccataatcagtgcctgtccactctgtaataatattgaattcttcacaccatttacgaagcaaatctccagagatacccagtatatttaccacttcttttggtaagtacaattttccagacataactacacctccatatgttaattaataattaatataatacaagaatcatgcaattaattttgaagtgaaacgtaccctgggattattaacgtagattctaataaaattgttcttatctcattattgattctatattaactgctaacttcttctatgtaaatcttaaagcaataataatgtaataactaattcctgaataagattattgttttatcttttaatcaataactatcattattgattaaaatgaaacggaaaaaacttattattgatttaattattgttcaaatacatttaagttaatcctaagttcaacaaaaaatgcattttaactaaaaaataaattccttttttattcacaaacacggattcttttttaagttcatcttaagttaaactaaagttaggatatcagaatacgcaaatggggtaatagctctaaaatagcttcattcaactaatgatatatcaaagataaaatgattaagtttaacagagccaaaaggaaagctaaagcattctttttaatttaaggacttataataatataatcaaaaatggaaaatgaaatcatatagtagatgagctatatgtagaaagtggctttcaagataaatagacagtaaacaactatgaaaggggacaccttatagttgtttgctgtccattacgaataactagcaattcttagctaaaaatgcttcatttttgatagtcatagacaactggaacgttgtccattttcatggttttggccacaatataacgacgatagccatcttttaagaccttcgatcctttctcaatcgttaacggcttgtcaaggtgtcctgtacgcttcacaaattcaatgacttcctctgttttcacagggtttggacgtgtctttaagaaggcttcaggaacgataatgtcctcaaaactcacgacatcctttgtcccttttggctgaataggttgctgcttctttgattgtgcagcctttttctcttgaacaggtgtttcgttcacttctggctgtacagttttcgcttcttttgctacaggctcttgtttttcttcctgcttagtagctgaaacctcttgttgtgccttagaaacctcttgtttcgcttcttttttatcttttgaatcattggcttctttatcgtttttattcgggagaacggtaatctggaagcagatgataccaatttctccagggcactcgtcaatgggaatatctaacgttggttccccttgaactaagatcttttcatgcataatactcttttttgtcagcccggttttattaaaggctttcttggcaacaaacaccgtatacgaaataaaggtgctctttttcagacctttaggcgcagaaggtgaacctttttcacgcatatcaaaggcaacgtagcgatcatattctcgtagtggtcctgtcgcagatcctgttagggtcattttatgtggcatggtgatctcctcctacatagttttatatattgattatttagaagtatgttctaaataataacactcttagtaaacatcagcttctaagggatttcttcactttatgattaagaaactgaaccttttaactggtcctgttggtgcaataaagcttgttcctgtggtgttaaggcttgtcctagatcctgttttagctgcgccatttctaacgaactgtacgtagtactgtgctcttggagcaaagtttcttcttctggtgttagttcttgccctaaatcttgctttaactgaatcatttcaagctgttgatccaaagaaatagtttcttcttgtgtacactcattttgctcctgttcagcttgtaaccaagcaggaaccaattccttacggatgatatgtttaggcgtaaatagagctgctttagcttcagtatgtatgtctgactcagatgtttgttcttctgtatttccttttagtagatttttaaattgattgaatgcaatttgataaacaagacggcacatttcatccagtgataggggaatgcccttatgattcgcctcatggacatatttatctaagcctacaatggctgtataagcaacttcatgtacttgctctttcataatctcaatctctgtatctcgttttactgcttttgctgcatttcgaatacgagcataaaagtcttttagttgatgaccatatttccctgcatacacgttatttactttcttaggaacacctttgatataagcaaatgactgtgaagcagatattaaatgattatttaaatgatttttaggtaaatcaaggttaataaagggggacgacgtttttccgccctcaaagcttggtgtatcaacgtttttagcacgttctggacttgtcacaggagttgtcacaggagttgtcatttcttcttgttgaagcgtttgaatacctgttgtgtcatgggcaaaaaagatttcctcgcaaatttgatcaaaattcctatggcttttaaggataaacacatagctatcaggatgagcacctgtcgtatcttctttgatataacgggccacgatcataaaaggtgttgcctttaacgatttcacaaagcgagaaacggtactttgggatacatcaaatttttccataagtgttttggagtgaatcgcttgaatgcctgtggcaacaaggttataaatcacgtaatctaacatttccatccgttttttagggaatactttatgtagggcttcttgttgttgtttaaagtatgtacgaagtgtttctaaaaacgcttctttctttttacgaagggtcggtttttctttccataaccatttaaatcgtccgttgaaggtatttacatcgggtaaatagcaagtcaatatctttgtcatttgttcatcttctcctttaaggaacacaaaaaagacactgtttcccttaagaaaggaaaacaatgccgtgattttgatgaactaagcccttgaaatagatgtcaatttcatataaaataaaaccataagttttattttatagaaaaactaactctattaacaagagacttcgacaagtgttttccctaccgtaactagggggaacggtttaagagtggtggtacactacttaaacagttgaagtcttttttctatccgcacgtttttgttagttttattatagcgttaactagtctcataattcaataaaaattagcaaaatatatcaaaacaagtatttttagctacgatccgtttgttatttctttaggagtcgacttcatcatagctgaatttgtggaattaggggaggggtatttttttacccctccctaaatagttagaaatgtgttataatgctgcatttctataacgttaaaggcttagtaattcgtacacttttaatgataagggtaaatagctattctgggtagggtgattttttctaatccttttttggtagatggggtgagaaaaaatcaccctattcaatatgcttataatatgatatgggtaacttttaactataaaggcagagggatatttttggcttcaaagatcgtataggaagctcttatgctttgtatatgcttctttaatgtcttctgaatagttttacgctttctttatccttagaagctcacaatggctgttaaaagtgtcagcaatgaactgtatagtttgctatcgatgaaacaaacgtaatgtatctatcaaaacataggtatgaaagctacttctactcattaatggccttttgaacttagctactacaaatcttgatttcactatactatagaagcataaaggcaggccttagcctgcctttataaacgctaagattaatcttcaaataaatgatccagttcttctgctgcttcccgttttcttttttccctgaactgtattttttcttcttgaatcttgtgtagcgcaactcttttggccttcttagtagcttctgtttcaccgaactgtgtggacttaaacttttgaatatttaaatggtcgtataaattattaacgagttccattaatacccgagcgtctatttgtgtgttctttgtcgtttcttttatctcacttaactcatcgtctaagtactggtaaaatccacttgctcttttcaggtaagcctgacctattgcgtcaattgtagcagcgtctaaaaatgtttcatcgggctcaatcgttcatattttcgaatgatatctgcaatggcatcgcctggaaaacgatagcctctttctttcatatgtttatgaagatattcatcagcctcttcacttaaagaaatcattcttctgtgtttgcttgcggtcattattcgtcatcctcccagaagagtttattgaatgtacgatccatatttgccatcgcatctgagcatctttgcattgtctctatggttcgatcatacaaatcatcaatagcttgttcttgcttttctacttcttccataatagataatgtttcaatttgttctttcaaaaaagcttatcgagaaagacccttttctttggctaaacgatctactttactcacagcaaccggacatacatttctcactttaatctccatgtttgttctcctttcctgtgtttttattgcatcaacataaaaaacgtaaaaacatcttgaagagcataaggggtttttgcccccacaggctgtgtggggttaggcagagcctaacaaaaccttgggtacaaggaaatgtttgcaagaaccccctcagcgcaccctcaaattgaaggacagtcccttcaccgcaccttcagtgatcacaacatttgtgctagaaaccccttcaccgacccttcatagttgataaatgtcccctcaagggtcacttcatttcgaggtgttttttgaaaaaaataagacagaagcaaacgatcttttttatttctttcgcacgttcatggtcaaaacggccatctgtttttgcttacaatgcaagtgatttacgcgtgcttttttaccatctatgaatcaatttttattctataaacgattaccgttctaaaaaaatacacgttcacaagatgtcggtatttatttttttcatgtttacatgagttagaaaaacattttataaaaaggaaaatgaaaagccaagacagaatgaaaattgtgataaaaaaagatgcgattcaatctaatgatgaaagcattcagttctatgaaggtgaccaaaaaagtctataagaaaagatccaaaaattaagtgaaaagcaacaagatttagccatgaagtgaaaaaacacatgttaacagtaggtcaacatgtgtttttttgaggttcacagtaggttcacatcattaatttttcatgttcacagtaggttcacatagaggaatttaggtcaacagtaggttcacactttagaggttgtcgtgatatcacggttttgctaggctctgcctagcctatcatcccgtgtgatagcaaaaaccccttatgctcttctctcttttgtagtagggaaccacaatctacaggaaaggaataaatattatggatttgttcttaaaaaatattgatccaattgtggttaaaaaaatagatgaaattgaaaagaaaaaaagatttcttgcaaggacttttttaaaagtcagtttagaaaggaaggaggtactgagagagagaaaggattatgacaaagaaagaaaagagaaatcataaaatagattcacaaaattttttgcacggaatagtggagcacattctaaaaaaacggagtacaacacaggaaatggaacgttaaaaaaagcaaaagtttgagagcaagagaaggaatgaaaagtcctctttttccatactacgatggtagaaggggggaagaagtagcaagcaaaataaggcgaagttattttagttatagaggatctatatttataaattcataatcaatcaatcgaatagtataaagacttttttctctttccagcttgcgagcaatgcatataatcattacagaactcacaatgggttaaatcatcctttataattgggagattaacaatactctcacaataaggacaaggtggtgtaatcactataaatctcttctatgttttaaaataggagagcattaatactctcccttaaaactcacgattcatattccttttcttcatcaatccatctatcttcagtcaatagcccacacttaggacatttatattttggatctagttgagttgttattgcctcaaaattacaaggttcacataaatgaattaaaaacaagtattatcacactccaaataaatagaaaccacatcatctttataggtttcataagtgataataacatcttttccatccttttatatttattttgcacatccaattatttataaaactattcggatccaaccagtaaaaaagcgactgctcattgttcagcaatcgcacccgactgtggaaaatctcatctatatgtattattgaactaaagcaacctttagctaaacaagcagcaatagttattatatttgtcctaaatctttaacacatatatcgaataatttgttcgatttgtcgagtttactttaacgcaacccattcataatcatttgagtgaattgagggctatattttatcaagttatcactattgatcgcttgactcttcagtccctccgtgaaaatatgcataaacatcaataaaacctcatcagaatatgcgggattaattttcccttctttacgccctttttgaaacagtcttaaaactaatcgatcacttgtttcttgtgcatccttatcaaaaaaagtctgttcacttgcaaattgctgcatcacattatgaaaaaatattgatgtcgtactttggatttctttcattttatattgcgtgagttccatatacgtttgttcaaaagataaatcactttcaatcaatcgttcgtattcttcatgaatagaggcaaatgaattctgtaacgcagtatttattaaattatcttttgtattgtaataattaaataaggttactttactcacacccgccctttttgcaatctcgtccatggttatatttgaaatgtccttttgattcagcaattcaagcgtagcttcttcaataattttcattttcttttcacgccttagatcaaagccattttttttcgtcatcttctcaccacattttttccgttttttaattactttctacatatatatagtatttcattttttgaactaattcaaacattttagttaaaaatagtttgaattaatatagatatgagcgtatattatgaactataaatgtgtttttagtaaaaaattcgtagaataggggatgagacgaatggttatagcagaaattaaggggctacaaaaaaaatataaatcaacccccgccttaaaaaatgtaacgatggaattaaaaagaggtgaagtattaggttttataggaccaaatggagccggaaaatcgacgaccatccgcatccttctaggtattataaagtctagtggaggaacagccaaaatcttcgggaaggatgtctggaaagattcgattgaaatccataaacgacttgcctacgttcctggtgatgtaaatctttggccaaatttaacaggtggagaaattattgatgtttttatgcgactgcagggaacgaaaaacgatgcacgacgcgatgaattaattcaaaaattccaactggatcctaagaaaaaagcacggacttattcaaaaggaaatcgccaaaaagttgcccttattgccgcgtttgctagtgatgcagaactttatatttttgatgaaccaactagtggtcttgaccctctaatggaagctgtctttcaagagcaagtagaaaatttaaagaatcaaggaaagtccatccttctttccagccacatcttaagcgaggtagagcgcttatgtgaccgcgtagcgattattcgtcaaggagaagtaattgaaaccggaacattagatgaattaagacatttaacccaatatcaatacaaggttacgacccgtgacgtaccgattggattaaaacaggtgaggggtgtgcatgacctagtgatcaatggtaaagaagctgttttccaagctgatagtgatcaaattgagtccattctagaagcaatcattccttaccatgtaacaaagctcgagagtgtaccgccgactcttgaagcgttgtttatgcgccattacactggaaagtaggtgagaaaaatgaaaaatcgctttaatatgactggaatgctctttcttcatacattacgtagagattggttaaagcttctcatttgggcagtggccttaagtcttttcacaggcggctttgcgagtgcaatgtatgaaatctatggaaaagaccctgctggattgatggctatgtatgaaaccttaaagaatccagcaatgattgccatgcttggaccaacatcagctgctgccgaaacgtatacagtgggagcaatgtacgcacatgaaatgatcctctttacgtcactcgtatttgccattgtatcgattatgcatgtaataagtcgaacaagaaaagaagaggatgatggaacaacagagcttattcgttcttttcaagttggtcgactggccaacacgacagcagtcgttatcgaaatgttccttctacatttggtcataagcgttctttctacaggcttgctacaagtccaaggtgtacctggaatggattttcatagtaacttattatattcctcttcattaggtatgcaagggttcttatgggcgatgattgcactcatatttgcccaattagctgctggagctggaagtgcaaggggactgagcttctttactctcggctttttttacattcttcgaatggtaacagatatgaaagcaccagatggttcttggttcaacccgttagggtggagttatctagtaaatgtttacattagtgatagctggcttccaatcgtcattgcttttgttgccagtatcgttttcattgcagtttcttatcttttggaacaagttcgagatatgggagctggatatttaccagaacgcgctggtcatgcacatgcaaaagaacatatgttgagtcttcctggccttgtattacgactgcaaaaaatatttattattggctggctctttgccctctttatatgtggagctatgtatggatccatttttggagatatggatgattttgcaagtgaaaatgagatcatgaagcaaatgttccttcataattcagattacaccatacaagaacaatttatgagcgttctcttcgtgattttatctctattgactacgatttttattgtaggaagtctcatgaggctcgtaaacgaagaaaagaaagggcgctgggatcagctttatgccactaaattaagtcgcaccaaattttactggtaccatatgataatagcttccatactaggagtggttggacaattttctgcaatattagggctctatttggcccaacgaagtgtcatggaaacaccgttaagtttctgggaaattactaaggctgggattgtgtggatacctgcgattttcttctttatcggcattttgtctgtcctaattggttggttgccgcgctttacgatgattatttgggcttatctaatatttgctttctttatcagttattttgggcaaatgatggagattccaaaattcgtaaccaacctagatgtatttagctatattccaaaaattccaattgaagaatggaaatggggagccatcatcttcatcaaattattggctctcttcataatcgttattggtttcatcggctataaaaaacgggatttagtaagtgagtaaaaaagaaacgggttttaacgaaaccactgaaaaagtgatcgtttgtaaaaaattaaagattttagggatatctaaattctaaatgtatcctcaagaaagaaacgggccttagaagcaactctagaggtccgtttttttatgactatataatgaagaacatatctatttgtcgacaatacaataatccaaaaaggtacacctttttagacggaaaaaaacaaacgataaagcgtctatttaatcttgaaaacaatccagacgtattaaaaatactcggccttattgtacgcttggtttacatctcttcccagctgataactatcagcattacttttgaagttggaagtatttttttaattcagaaaataattataagaatacttatttcgacatacttcaacatccattatgtagtaatatttatataaatttacacattcagataaaggcaaactagttgaaaagctaggacgcaaagctacaggtctaaagtcaattgactatgacagctgagcctcctgaaaatctggaggaatttatgtttatggacagtaaaaaagaagtaataacgtcacatttagaccaagaatggattagacttatccaagaggctaaggaagtagggttatcggttaaagaagtaaaagcatttttagataatacacaaacctagcgataacaaaaaacattagatagacacgctatctaatgttttttgctatcgtgttatcttgagattttgcttctagaaactgtttaaattcttctttactcacatttgaattcattgcatctttaactagcttcatccactcttctggcagaactgctatagactttttcataatagtacctccttacataagtcctttttatcatttaccgtttgttttaagcttaaaaccctattttatagtgaccacccactatattacaactaaatagttaatcctctttactttaatcgactatagatagctgtttatgtagtaaaaaataaaattctttctattattcttccggagtcaccgcattttttatattctgatattcttttcaccggcgataaaaagtagcttcacttatatttgtgattttacaaatttcctttacaggcttattagtagtttcatgaagatccatggcatgccttaccccatcatgctttaacatgaatttttgcttctttcctttatatataccttttagtagtaagatgaactacttatcacttatagatctagcataaggagtggatttttcaacataattataataataaggagaaattgcacctattaagtaacctaaaggtggtgagtacttatgaaaaacagggataaaagacgaaaaaagaaacgtgattttttaaaggattacttaaaaaataagttaggtaattggaaacctggacttagcaaagagccgacctcgaattctaagacgacacaagaaaatagaaaccttgattaggtaatatttgtgtataggtatttagaaatttgtcaacatgaaaaatagccccctttagaagtctatctctagagagggctgattataaagcatatttagtaaacttattttaaatatttagaaaattaaatcactaaggaattattgagtaaaagaattaaagataaattctacttgtgtgttttaagacacacattcctatcaaaaccaacacaaaataaaaataataaacgttagataattttaaaataactcgttaaacaaatcgttaatactttttacttttagatatagataatatttattgttatattattcataagagtaaacaataaaacactttatttaaaatagtgttagccattacatacattgtagaaaaaggttagtgcttatttgttatagtatttgaaataggtacatgtgaatagaatatccttcacaaaggtactattcattctcatgtacctataattttctttatttagagggcagactttttaataagtcataggtaaggcagacaggtgtatcatttctcggatcttttacaatctcagcgtcaatttgaaaaacttccttcaatacctgtgaagtaataactgtttcaggttttccttcgctgacaattactccatcacgcatagccactatataatcagcaaatcttgctgcaaggtttaaatcatgtaataccattacaatggttcttccttcttgcttatttaggttttcaagaagtttaagtatttctaactgatgagctaagtctaaataggtagtgggctcatccaataaaattaaatcagtttgttgtgcaagtgccattgcaatccatgcacgttgtctttgtccaccggatagagcgtcaataggtctatttttaaatgaagtcatttcagtaatatttaaagcccattcaataacttttctatcttgatcagacagttttccaaatcctttttggtgaggaaatcttccatacgtaataagttcaaaaacagtgattccagaaggtgcctctggtcgctgagggagaatagccatttttttagcaacttcttttgttgattgtttgctaatagcttttccatcaaggtaaacagttccatttttaggcgctaaaatacgtgcaagagctttcaaagtagtagattttccgcacccatttgaaccaataatagcagttatcttacttgtaggtatttgtaaattaagctttttcacaatttgtatatcgtcataagataaatctaaattttcagtagccaggatagccaatttcattgctcctttttatgattgattagtatagctttaatttcatttctttatatacaaagtttaataatgaagtatcttttaatttatttagttctcatcaataggtagataaaatacggagctcctaaaatagaaactaaaatccctacgggcatttctgtaggagacatcacgatacgtcctactgtatcggctcctaataatattaatgaacctaaaagagcagataatggtaaaacttttttgtgattgggtcctattaatgctcgagagatatgcggtgcaattaaacctagaaatgtaattcctcctccaacagaaacacaagcccctgccaaagcaacaccaataagcaataattttaatctttctttttcaatggatactcctaatccaatagaaacttcatccccaaagcttaaaatatcaaggaaacgtgatttatatacagcgattggtattaaaagaattagccataacaaagtggatataacaaatgaccaatttgtaccccatatactacctgatatccaagttaaagttttcataaaatcttgaggttccattttcatttgtaaggccattgtacttgaagcaaaagcagcgttgattccaatacctaccagaattagtcgaataggggttactttaccccgtttccgagaaaatccataaattaaagccgcagctataaatgcgcctagtaaagctgtaaagggcatcaaaaagattgacataatgcctgttaaaaaactagagccatgaaaaataaacatatatagtacaacggaaaaacttgcacctgcattgattcctagaatacctggatctgctaactcatttcgagaaatactctgcataatagctccagatacagcgatacctgctccaattaaaatagctagtacaattcgaggaaggcgaaaattaaacagtattaatctttgattccctatatcattcccgaaaaaagcagaccaaacttgtgatagaggaatcttaataaatcccgcgttaatactaacaattaaaattagaaacagtaatagtagtaaggttacgcataatagcttatatccgtgcttacttttatttaataattgaatcattataagttcgtcccttctttacgagctagatataagaagaaaggaacaccaataagagcagttacagctccaacgggagtttcaaatggtggattaatcattcttccaagaatatctgcagctaacaataaaacagctcctattatagctgaacaagggataatatatctatagtcgatgccaactataaagcgtgttatatgtggaacaactaatccaataaagccaatcattccagcaattgatacagctgcaccggttaataatagtacagcaaccatgcctaaaatacgtacaattcgagtgttttgtccaagcccagttgaaacttcatccccaagactgagaatcgtaatagagcgtgaaagaaaaatagaaataacaattcctattattatgacaggtatagcgtattttaattgattcatttgaatacctgaaacgcctccggcataccagaagttcatttcctttgctacattgaatttaagaccaattgaagtagataatgaagtaaataacgcactaattgctgtaccagcaagggccagctttactgatgtatttccgccttttgatatagcaacaattccaaatactaaggctgtggcaaaaccagctccaacaaatgaaaataaaatcaatttaccataggtaatgtcagggaagaaagcaaaggcaagagctatgcaaaaagaagctcctgctgttacacctaaaatagaaggcgaggcaagaggatttcttgtcatgccttgcataagactacccgaaacagccaaagcagcacccacaaaaacagctgctaatgctcgaggtaatcttaaatcatgaataatgacatgtgctgaattattatcattataagaaaataaactctcccaaaccgtacgataggtaacatgagatgcaccaaaatgaatagaaaaaataactgatagtaatacagcaatccaaccaaataaaatgatagtaatccctatcttttttttgtaactagcttcatcctgtagttcatcagccactttatttgttttatccatataaatttttcctcctgcacgcgaaactaaatgtactagataatggatattaattaattttgcaaagtactttagaataaatgtaatagccattgacattataggatgaattcgctttaattaatagtgataattattatcaatgaatcagacagataatattttaacatagttatagggggattaaaatgaagtatggtgtaaaaataaaaagagttctacaaatttgcagcgtgggattattgtctgttggtctggttgcatgccaagataatcaatcttctgaaaaacactcagaaaatcgtgcggtaactgatgcagttggacataaaatagaagttccaacgaacccaaaacgtgtattaggatcttatctagaagatccactggtagctttaggtgttacacctgtagcacaatggtctgttagtaacggtgttcaagattatttaaaagatgatttaaagaatgtgcctaaaatctcttatgatttaccatttgaagctgttcaaaagactaaaccagatctaatacttatggactcgtctagtatggtagagggcggaaaatacgaccaatacagtaaaatcgcacctacatatgtagtgggtaaagataaaaataatgactggcgtaaagaattacaagaagtaggaaaagtattgaataaaaaagatgatgcacaaaaacttcttgacgattatgataaaaaagtaaaagatgcaaaagcaaaattagctgaaaataaagaagttccttctgcagcagcagtttggctagtaaataataaattatttatctcttcgaaggacttatcaagtggggacgtcctttataacgatttaggattaaaagtaccgaaggtagtagaagaaatatccaagaacacagaaaacaattggaatccaatttctttagaaaagttagctgatttagatgcagattatatcttcttagtaaatagtgataaaaatggggcaagtacattaagtaattctatttggaaaaacattcctgccgtaaagaataatcatgtagctgaatttcctagatcctctagttggctgtatacaggggttattgcaaatgatcaaattattgatgatgttctaaaaactattaaataatgaaacatcttgttttcttcttcatttgacactttgaaaataaaccaattattagttaaataactataaatcagatttagatcatttacattcatataagatacgagtgaattaaaacgaaaaataaccagcgcttttctaaaaagtagtggttatttttctttttacattgtgttggaagatataaatttttgaatagggggatgttgatgttacggcggtttttttcttactatagaccatataaatacttatttttattagatttttgttgtgcaattctagctgcattgttggaattagtgtttccattggctgtaaacagagtagttgacgatttattgccaagtggtaactggtcttggattttatggggttgtattggattactaatgatttacgtaattagtgcaggtatgaactttgtggttacttattggggacataaattaggaatcaatattgaaaccgatatgcgtaaacaattattcaatcatgtgcaaaagcaatcttttcgtttttttgacaataataagacagggcatcttgtttctagaatgacgaacgatttaatggatatcggtgaaattgctcatcacggtcctgaagatttatttatagctattatgaccttaataggtgcttttggaataatgtttagtatcaatccacaactcgctatcctaacatttattattgttccgttagttagttgtttatccatctattttagtaaaaaaatgtctaaagcttttaaagggatgtttagtgatattgccaattataatgctcgtgtagagaataatgtaagtggtattagagtagtcaaagcatttgctaatgaagaatatgaaatagagaaatttgccgaaagcaatggtaagttccgtaaaacaaagttattaacatataaaataatggcatggaatgcttctattagttatgtgttaatgaagattatctctttatttgttcttgtatgtggttcatggtttgttatccaaaaaaatatgacctatggtgaatttatcgcttttgtcatgttatcgaatgtgttcttaactccgattaaacaaataaacgcagtaattgaaatataccctaaggggattgcaggttttagaaggttcttagaccttcttgaaacgaaagcagatatatcagataaacccaatgctaaggatattgaagaattgaaaggaaagattatcttcgataacataacttttggatatgataaaaatgatcaaatcttagagaatattaatttgtctattcagccaggagaaactgttgctttagttggtccatctggggcaggcaaaaccaccttatgcaatctattaccaaggttttatgatgttgaccaaggcgagatcttaatagatggaataaatattagtgaaataaagttgaattccttacgttcacatattggaattgtacaacaagatgtattcttatttgatgggtcgattcgagaaaatattcaatatggtaagttagatgcaaaagatgaagatattttagaggcattacgtcaagcccagctggaggattttgtattaaaacttcctcaaggccttgatacattaattggtgaaagaggtgtgaaactttccgggggacagaagcaaaggttatctattgctagaatgtttttgaaaaatccttctattttaatcttagatgaagctacctctgctctagatacagaaacagagaatgctatacaagaagcattatcaaaactgtcagtaggtcgtactactttgattattgcacatcgtttggcaacgattaaaaatgcagatcggattattgtagtggcaaataaatcaatcattgaacaagggaaacatgaggaccttttagccactgaaggagcttatagcaaattacatcaagctcaattcagcatataacttacaagttatatgttgaaactactgataaaaaacttaaatttgtgcaagaagaccattgaatttattcgattgcttactaaaaaacctttaagataatcccttcttaaaggttttttagtatctttaggcttatgtgtgagaatcgttcactttggtataagctgttcattattattttatacctaggcgcattcggtaactaaataacacattttgagcttttccagtaaatgcttctgttacattgtttttgaaatgttcaacttctttataaagttcatgtgctcctttttttaaagctgtttgtagcccaccttgacttaatgcaatatttgcatatcgatctgcattgcatagttcccagttatgaaagacgatctcctttgaaaatcgaaataagcctgactcttcaatttgctgaagatgtttttctttattccacttgtggggatgtttttctacgtctgctaattgtcttgcccgtgtctcagcaagattaattaacttcttatattgttcctcaactatccagttaaaagtaggcggccaatcacaatcataagcagcgaatatgcctcccgaacgtagtacacgtgcacactcatgaagagtactctggggttccatccagtgaaaagattgagagcaggttataatgtctatagattctgatactagttctaattgatgagacaaacctttggtaaaatgaatattagatggtttatttattctttcccagttagtaatagctactttacgcatatcatcattgggctctactccaataatgtttacagagtcattcatccataagaacgaagaaaggccagttccacaccctatatctacaacatttctcggcttttcccctaagtaagtatgtaaaatttttatcacttcccgaggaggactaggtcgatttcgatcgtaaaggttagcaaaacccgtaaagcgttcgatattattattatttacttgttcacttgtacacatagactgtttcactcctttgtaataagtgtgaatggaatattataagtataaattaatttatacgatgttgtcgccttttggaccttttctacatttaaaataatagataattgtaaaaagaaaaaccacaaattcattaattaataacgaatttgtggtttatttacttcctttaatacctttttttagttttgacaattaaaatattcaagcaaattagaaatcattaaccctatcttttaacactttgcaacagaattaaatctcttatccgtaaaaccatacgtttacggacttttcttttaaatagaaaatccatcgtttccatcgtccgtttaagtttaaaaataaattacgaacgtcttcttaaattcttatatttttacgaacgtttttaatggaatagtagaaagagaaacacataaaggaggactgtttttagaggttgcaattaaaaaacaattaatactcaagcagcatttcgtgatttttatcctatttaaattaatacgaaattatagtgggaaattaaaatataagtagacaactgctatttaatatggtttgctgaatttaaagaatatttaatacattctttaaatttatttctttaaggaggattttatgcgtttaacaatcgaacatattttaaactttgatatcatgaatactgcaacggtaaaggcaggaaaagacattataaatcaaaagtatgttcagtggatttctgctattgaaatgcctgtagaaaattttgtgagaaaaaatgaagtggtattaactacagcaattggttgcgggcatgatttggaattattcaaaggttttgtgcaagatattatagaatcagaggctacggctcttattattgctgtaggtcgttacatatttgatatccctaaggaagttattcaattagcagaggaaaaacaattaattatcattgagattccctgggaagttcggtttgctagtataattgagaatgtgatgaaagaattaaatgaccttaattataaggaatttaaaaaatcagaaagaactcaacaggaactcttaaaattaattttgcaaggtgaggatcttgattatatttctaaattcgttcagacagaaataggaggaacagtcctcatcaccgatcggaatggaacaattgaaggaacaagcagccatagccgaaagattatagaaaaatggcctctgtatattgaaaaaaatcttattccgtcaacagagagaacgacgttaacacgtgatcctatgtttcaaaaatttaaaagtattgcagtagaggaccatacaattttacaactccccattcttaccgtttcaggtgaaatacaaggttatttatttgttattttacgcgcagggctatgtatagatttatttttaacacagtaccgcgtcaatgtattggaacatgctgtgacgactatagctctttggttttctaaaaaaaatgccattgaagatacaaaaatgcgtttgcgcagtgattttgttcatgaactcgccaagggagaatttaactctttggagcaggctcattcaagagccaaagtgtttggatataacttgaaattgccctatatctgtgttttaggttttccagaaaatttaaaaaagatttttcgcacacaaaaaaaagatcatgacttgttcgaacattggcttgacagtatgattcactatattgaagaagaaatttcatatgcagcaaagtcactaaacaagagggtgatgatgagttatcatggggaagaattgattatttttctagaggataacataaaaaataacaatgatagcgctaacaattttttgaacttggtagagagacgcttacgaaatttgcttcctgaggtaatcatatcatggggaaccggaaattatcatgaaggtattgttgggcttaaggaaagctatgaaaatgcaaaagtagctttaactattggtagaaataaaaaagggttaggagagcgtatgctatatgagaatacgcgcattgatcgtgtactcctaaatcttgctgaaaacgaggagatgaaagaagtcatcttatctactattggtccgttagtgaagtatgatgaacagcgcaacatggacttaataggtacatttactacatacaatcattatcatggaaatgtgagtcaaacggcgagggcattaaatcttcataggcaatctctgatgtatagactaagaaaaattgaatccttgactggactttcgctcattgatcctgacgatttatttttattagatctaagcgttaaaatttggaattcaggaatgtcaaacaaagcgcttaatttagtttaagtacttaaataaaaaactatatagtagaattgataagttaataagagctggaagtttaaatggtgatgacaagaattttattagtattgtcatcattttatgttggatcttgaaagtttttgcgttggagatgcattatttaaaattgtatgaagaaattatcttttcattagccactttcatcaatagattactgaaaattcaaacgttataatcaaaaggaagatatacgtacttgttttaataatgagaaacttaatatcaaggagggagaagcttgaatcatctcaagtctgtaagaaaagaaaatgaattaaccattcttaatatttgggaagcaaaaagaagaattgcttccattataaataggactccattaattcaatcttatattctgtctgaaaaagtaggacgtcccgtttatttaaagcttgagaatgttcatgagattggagcatttaaagtaagaggagcagctaataaaatattgagtttaaatgaagaggagaaaaagagaggaattgcaacattctcaacaggaaaccatggaatggccgtagcgtatgtagcgaaaaagcttggtattgaggccgtagtatgtatttcacaacgcgttccgaatgcaaaagttgattcgctgaaaagactgggcgcaaaaattgaaatttacggagacagtcaagacgaagcaggggagcgctgttatgagttagaaaaagagaaagggttaacagttatagaaccatttgatgatccgcatattatcgcagggcagggaacaatcgggttagaaatactagaggaagtacctgacttaaaagatgtgattattccactttcaggaggaggattgctgtcaggaattggattagccttaaaatctaatgatccgtccataagaataacgggagtctcaatggagcattcggctgtcatgtatgaaagtttaaaagtaggaaagccaataaaattagtagaaaagaacactcttgctgatagtttattgggtgggatcggattggataataaatatacattccagatggttcagaaatatatggatgatgtcttgctcattaaagaggaagaaatttcctatagtatggcttttatgatggataagcatcgtatgattatggaaggagccgcagctacgggagttgcagcagttttaggtaataaagtggcccatcaagaaggagcgctagctattattataagtggacaaaatgttgacctttctgtacttcgtcaattaattcaaaattatagttgagtcaggtatattttcaggaaaagtataaaacgaataaagatttttggaggagaaaataatgaagaacataggaacagatcgtgtgaaacgtggaatggcagaaatgcaaaaaggtggcgttatcatggacgttattaacgcggagcaagcaaaaattgcagaagcagcaggagctgttgcggttatggcattagagcgtgttccagccgatatccgtgcagccggcggcgtgtctcgtatggcagatccaacaattgttgaagaagtgatgaatgctgtgtccattccagttatggctaaagctcgtattggtcatattgttgaagcacgggtgctagaagcaatgggcgtagactatattgatgaaagtgaagttctgactccagctgatgaggaatttcatttaaataaaagtacgtttacggttccatttgtgtgtggttgccgggatcttggtgaagcagcaagacgtattggtgagggtgctgcaatgcttcgtacaaaaggagaaccagggacgggaaatatcgtcgaagcagtacgccatatgcgccaagtaaatgctcaagtacgtaaagtagtgggtatggacgaagatgagttaatgacagaagcaaaattactaggtgcaccttatgaattattaattcaaattaaacgtgagggccgtttatcagtggtgaacttcgcagcaggcggtgtagcaacaccagctgatgcagcgctaatgatgcagcttggcgcagatggtgtattcgttggttcagggatctttaaatcagacaaccctgaaaaatttgcacgttccattgtagaagcaacaacgcattatcaagactatgaactcattgcaaacttgtcaaaaggattaggaaatgccatgaaaggaattgaaatttcatcattattaccagaaaatcgtatgcaagaacgcggctggtaatgataaatctacattattcaaaaaagtacctccaataaggtgatgaaaaggataatattatccttttcatcaccttattttatttattatttatagataaagaaattaatcatataattttctgtacctttgttatgtaaagaagccttacaaatgttaagaaattaaaggctattttgtacgattttttgatagtttgactaaaaaagtcttaaaaatttcatgcatttttgcgaatgttaattattctcttatttaaatataatttaattaagagataaaatattcataatattaagtttagaaagcaggaggaatctattttatgtcatttggcacaacagaatacagagagagaattcaaaaaacaaaagaaaaaatgactgctcaaggaattgaagtattgcttattacagatccagctaatatgaattatttgtcaggctatgacggatggtctttttacgtacatcaaatgcttgtcatcattaatgatgaagatcagcctatttggatcggaagaggtcaagatgcaaacggagcaaaagtaacaacatggctttatcatgaaaatattattccatatccagatgattatgtacaatcagacacaaaacatccaatggattttgtagccgatattttaaaacaaatcggacaggacaatcgttcaattggtgttgaaatggagaactattattttacagctaaatgttatcaacaattgcaaaaaggtttaccaaatgccgcatttaaagatgcaactcttttagtaaactgggttcgccttattaaatcgagcgcagaaattgaatatatgaagcgtgctgccattattgttgaaaacgcgatgcaggagggaattgcatcaattgatgtaggtgtgcgtgaatgtgatgtagcagcgaaaatattccatacacaaataactggaacaaaagagtttggaggggattatccagccatcgtgcctcttcttccatcaggtgagaaaacatctacgccgcatttaacttggacggacgagcgttataaacaaggagatacagttattttagaactggcaggctgttacagacgctatcattcaccacttgctcgaacagtaaatattggtaagccttcagataaagtacaactactttcaaatgttgtagtagaaggattaaatgcttgccttgacatgattaagcctggcatagcatgcgaagaaattgaagagacctggagaagaacaattgaaaaaagtgggattataaaagattcacgtattggttatgcaatgggtcttaactatcctcctgattggggcgagcacacagcaagcattcgtaaaggagacaaaacggttctccagccaaatatgacgttccatcttattccgggcatttggctagacagttacggatttgaagcaagtgaatcactccgtgtaaccgaaacgggatgtgaaacattcgcttctcttccaaggtcattatttataaaagatggtgcattgactaactaataatttattcgcggaggtgaagtacatctatgtatatttttacggaaccagaactaaaacagtatattcaattgaatctggaagctatcaatattgtagaagaagggtttacaaaattagctaataatcaggttgaaatgcctccgatcatgcgcattgatcttcatgatcaaaatggggaagtggatgttaagacagcgtatgtcaaagaaaaagacatgtttgctattaaaatttcttcaggattttttaataactatcagctgggacttccaagtggaaatggcatgatgatattaatgagcactcaaactggtgtacctcaagccattcttttagacaatggatatttaacagaagttcgtacagctgctgctggagccatcgcttccaaatacctttctaaaaaacatgtgacgacagttggagtgattggagcaggaagtcaggcgagattccaagtcagagcactaaaattagtacgcgactttagtaaagtactagtatatgcccgttcaactaatcgagctaaaaagtatgcacaagacatgtcattagagcttggagttgaagttaaagtcgtagacagtgccgaagtagtagttagaaacagtgatacagtcattacaacaactccagcaacagaacctattattaaagcagaatggctgcatcctggtcttcatattacagcgatgggatcagatgctgaacataaacaggagttggaggccaaagtgctagcacgggctgataagcttgtatgtgataaaaaggaacaatgcgctcgtttaggagaacttcatcacgcccttaatcaacgtatagtaacggataattcccccattatcgaactgggtcaactgacttcaaaagaagtacgagggagagaaaatgatgagcaaatcacagtttgtgatttaacagggacaggggttcaagatacagcaatcgcactgtttgcttacaacgaaatggtgaaacgaaatgcaggatggaacgttgaaaacaaaacattatcgttaaaaaactaatgaggagtgatcatatgacaaatgaaaagatcaaggtaggtacaaaagcagtatgggcaggagaaaaagagtatttggtgcacggggctacacaagtgccagtcgttcttagtgtggcttatggttacgatgatatggatgaatggtatgatgtagcaatcggaaagaaaaagggacatatttacggacgtaatacaaatccaacggtccaagcatttgaagataaagtgaaaattttagagggtggggaggctgctacaagcttttcaacaggaatggctgctatcagcaacacattgtctacctttttagtaccaggtgatcgtattgtatctataaaagacacatatggcggtaccaataaaatctttacagagtttcttccccgtcagcaaataaaggtaactctttgtgaaacaggcaaccatgagcaaatcgaagcagaagtggcaaaaggttgcacaattttatacttagaaacgccaacgaatcctacagtgaaaattacggacattgagcgtatggctaaagtgggccgcgatgcaggtgcgctagttattgtagataatacatttggaacaccgattaatcagaatccacttgcattaggagcagacttagttatccatagtgccactaaatttttaggggggcatgcagacgcattaggaggagtggtgtgcggttcaaaagaacttgttgaaaaaatctatcacttccgtgaaattaatggggcaacaatggatccaatggctgcttatctaatgttacgaggaatgaaaacgctacatttacgtgttcgtcagcaaagtgaaaatgcaatggctcttgcgaaatatttacaaacaaaagaaattgtagaaggtgtttactatccaggtcttgaaacgcatccaaatcatgatattgcgaaaaaacaaatgaaacaatttggaggcatgcttagttttgcagttaaaggcggtgttgacaccgtaagagaccttctgccaaaattacaattcgccaaccgtgcggctaaccttggagctgttgaaacaacggttggacctgctcgtaccacaagccatgtggaatgtacaccagaagagcgtgcggcaatgggaattccagaagggcttatccgtatctcttgcggtattgaagagattgaggacattattgctgattttgagcaagcattcaatcatgtagaaagcgccctaaaagtttaatgaaagtcttgtaaaaggaagtggaaactgcatgaccaatgctcattctatggtcgagcaagtaaatagattatatacccaattaattgaatggcgacgcaggtttcatcaacatcccgaactcagttttcaggaattcgggacttctaaatttgttgctgaaacgctacgaagcatggatggaatagatgtagaaacaggaattggagtggaaacaagcgttgtaggcaccttaacttctggcgccggtccaactattgcaattagagctgatatggacgcattaccaattcaagaagaaaatacaacagattattgctccctaaaaaggggtgtaatgcatgcgtgcgggcatgacgcacatacggccattttacttggaatcgctcgtgtgctggcctctgcttttaaaaagggaaaactaaaaggaaccgtaaaatttgtctttcagcctgcggaggaaagtacagatgaaaacggactctcggggtccccttatatggttcaagcaggtgtgtatgacgacgttgatgcagccattgcccttcatatgtgtccatggctacccgtaggagagatacaaataaacaatgggtatagtatggcaaatgttgatgtatttgaagggaagatttatggaacaggcgggcacggtgcctacccagaactcggtacagatcccatttggatgcttggtcctgtgatgcaggccttacatggtattatatcccgtaaagtgtctgcattagatgcaggtgttgtaagtataggccaagtacatgcaggaacagcaagcaacattattcctacggaagtttctattacaggtacgcttcgcagctatacacccgaagttcgggatttattggcattagaattagagaaagcgttttcgatagtaggatcgctagatggaaagtattcgttcaaagtcgaaagaggagaaccagcattaaataatagtgctgctattaacgactggatcatagaagctattgaggaaatgtaccctcaattaggcattacaagacgtccgtttgggatgggcggggaagattttggctacgtgacgcaaaaacttccgggttcgatgatttttcttggctgtgcgctaaaagatgaggttcaaagagatttacatacccctatttttgatattgatgaaacttgtttaccaatcggggtagcagttcttgcacaaacggctataaagtttttgaagggtgaggttactttaccaatcaatgagcagttggaggtacaaacatatggcacataaattagcattaatcggatttggcgtagtgggacaagggttagccgaaattttacgcgataaaaaagagatgttaaaaacagaagaaggcttcgaaggtgaaattgtagccatttccgattttataaaaggttcaatctatcatccaaatggactggacatcgataccgtcctgcgtgtgttaaacgaaacaggcaatcttgaaaactaccctcaaacaccgggacttatcaccggctgggatagctttaaaaccattcgcgaaacaaatgcggatacaatcgtcgaggtatcttacaccgatgtaaagacaggacagccggctatcgaccattgcaaattggcatttgagagtgggaaaaatgtagtgatgaccaacaaaggaccggttgcattagcatataaagaactttccgaactcgctagccaaaagaacgtatcctggggattcgaaggaacggtaatgagtggaacgcctgccttaagaatgccagtggcaacacttgcaggaaatgatattactgaaatacgtggtattttaaatggcacaaccaattatattctaacgaaaatggaaaatgaaggtatctcttatgaagaagccttaaaagaagcacaggaactgggctatgctgaagcagatcctacaagtgatgtagaagggtacgatgcaagatataaaatttccattttagcaaactatgtaatgaacgaacccttaaaagtagaggatgtaacatgcgctggtataacgaatattacgctaaaagagattgaagaagcaagaaaagaaggaaaacgctggaaactgttagcgaaagcccataaggaaaatggcgccgtgaaagcctccatcgctccagaaaaagtggagatatcagatccacttgcatcaattagtggtgctgtgaacgccattacctatgaatgcgatcttttaggaactgtaacgttaagtggcgctggagccggaaaagtcgaaacaggtttctctcttttaattgatttaattaatattgatcgtgaacgaaagctagtaaatatttaattatagaaaggcaggaatggtgatgaaaattcaagttgctggtcgaaagatgtattttgcgggtaaatggactggtagggatcagaccattgaagtacgagatccacaagataatagcataattgatacagtccctgctgcttcagccgaagatatgcttcaatgtatagaagaagcaaaagatggagcaaaaatcgcggctactatggcggttcatgagcgaatggcagtaatttataaagcagccgattatatcgaggcaaacaaagaaaaatatgcatctaccatagcacgtgaaggtagcaaaacgatccgcgaagcaacaaaagaagtagcaagatgcattcagacacttcgaattagtgccgaagaggcaagaagaattcatggtgagaccattccgtttgaccaaatgccaggaagtgagaaccgagttggatactatcagcaagtcccaattggtgtcatcggtgccattacacctttcaatgatccattaaatcttgttgcacacaaagtgggtccagctattgcatcaggtaatgccattattgtaaaaccagcaactgtcacaccattaagtgcacttttacttgcagaagcgttcgctgaagctggacttccttcaaaagtgttatctgtgataacaggttatggaagtgagattggggatgttcttgtgaaacaccctgcagttcgtatgatttcttttacaggcggacttgaagcaggagaagaaattgcccggaaagcaggactgaaaaaaattagcatggagttaggttcaaattcaccggtcatcgttttagaggatgctgacttagaagacgctgtagaatcgacagtttccggcgctttttgggcagctgggcaaaactgtctaggagtccagcgaatatatattcaagaaagtgtgattgatcaatttaaaactgcgtttgtggagcgtacgagccaatacaacatgggggataaacagtcagaactaaccgacatgggtccacttattacagagaaggaagccatacgtgtagagaagatggtgaatgaagcgattgaaaaaggcgccatgttattaacaggtggcaaacgtaacaaagctttctattcccctactgttctgaccaacataccagaagattgtacgattgctaaagaagaaatttttggaccggttgttctcttgtattcagttttggacattgacacagcaattgaaaaatcaaacgatgttaattatggcttacaggcaggtatttttacaaagaatatcgataaagctcaaaaagccattgctaagatggatgtgggtggtattatggttaatgatagcagtgactaccggattgatgctatgccgtttggtggtatgaaaaaatcaggattaggacgagaaggaattaaatttgcgattcatgaaatgaccgtgccaaaagtcgtttgttttaaattatctaattattaaaaaaatacactaaagaattattcaaatatcgaagaaagggaatatgctataaaaagcaaaattccctttcttttaaaataatcggaaaattcaatctgtaattttctgactaatgaaaattaattttattcctatttagtttattggttaatcttttataacttacgtgctcatttaggtcccttttcttttatgcctagctattcaaatgctaatcatgaagatcaacatttgaatagctagactgtatattggaatgtaaatgatttattttcacttatataattgactcaagcaacattcggatgtattgaaaatgataatacggaatctgtaacagatatgaatataaagaggacactgaagcaatgaatcaattatttgatgaggaggcacattgtgggccataaaaaaaatgaaaaattaaaaagagaagatattactattgttgatactaaaattgctaagcagtctatgatgggaacctcccttggtaacgcgatggagtggttcgactttggaatttattcctatttagctgttacaatggggcaagtgttttttcctgaaatcgatccctcttttcgattgatctatgctttcgcgacttttgctgttgcttttatagcaagaccaatcggtggcttatttttcggtatgatgggtgatcgtcttggtcgtaagaaagtgcttgccattacattaattatgatggcgatcgcgactttaagcattgggctcattcccagctatgatgctattggtattgctgctccgatattattacttattgctaggctagtacaaggattttcaactggaggagaatatgcaggggccatgacatttatcgcagaatccacgtcagataaaaaacgtggatttatggcaagtggtttagaagttggaacactcgttggttttagcgcaggtgccggattagtcacattatttaccttcctccttggagataaaactatgctcgaatggggttggagaattcctttctttattgctgctcctttagggttaattggtttttattttcgaaatcggctagaggaaacacctgcatttgaagcaatgatgaaggtagaagaagaaagaagtccagcttctcttaaagagattttgattcaccattggaagccattgttaatttgtatcggaatcgttctcttttataatacgatgagctatatggttcttacttatatgccttcctatttatcagacgagctaggttatggtgaaaagaaaggactattcttagttctaattgttatgattgctatgattccatttgtcctagcaatggggtattggagtgaccgtattggtcgaaatcgcattgttaaaggagctttaatcgggacaattattctgagtataccagctcttatgatgattggtaatggaaatagctacactgcctttttaggtttgtttattattggtattctattatctgctttccagggagttcttcctgctacattaccgtctttattttttacaaaagtacggtatggttcacttgctattacgtataatgtttctacctctatatttggtggaactacccctctagttgtggcttggttagtaagtgttacgaagaataaaatggttcctgcttactatctcatggctgtttgtgtgattgggcttatcattgtcgccttctttgttaaagaaacagctggtagatcactacgtggatctgctccagcagtagataatgcaagtgaaattgaacaagtattgaaaaatccggatgaagccctttggtgggaagaagaagttaaacacggaaatattaatcatagtgtaatggattctaggcaagaaaatgcagagaacgtacgttagatcaatttctaataagtaatgaatttttataaaaaatttacctttgtattaatgaatatacagtttgcaagagaagctcaaacattttatatgaaaatgtttaccttttagcttatcctaagacatatattattttttaaggaaagacgatcctttgggcatcttttcttgttaattttatttgttataaagacaaatacgccctttttctacatggtgtgtaatgagtaaataattttctattcaatatattaatcattacttataaagcagtagataattgattgttttttaaatatatgtatataaaataatagctattgtcagagaagaggcccttatgagatttcaagggccttcttactgatcaatctctataatatccattatgttaactaaaaatatatgagagagactttgataatttaacaaagtacctcaactgtaaatcctccaggtgcctctacataaaatgtataaccatgtaattgttttggaggttcgacattaaatccatcttcttttaaccgttgattaattttatttacctgctcttcattctcttgggggaatccaatatggaaggtctttggatagttgactttgcttcccttcattaaagttagtacaaaaccatcttcatcatgcattatagcaaaacctttacccctgtttgccctgcatgtcataccaaaataagtttccaaaaattcttgagtagcaggaacatctgtaactgttaggttgaggtgatgaattttcatgttttcatcctttcttaaatatattcaataataattcttgtgtcgtatcctataaaaaccattaattagatgaacagtttactctatgaatgtaaatatttatctatatctcttttaaccattcgttttacttcttcaaaagcttttgtttgcccttcgtaaaatatagagctgtttaaatcctttcttttttctgcatccttagaccatctttccgacctttcaattaacttatctagtacctcaaccaacttctcacttcccacgactaccccacctttaactggaaatttttacacaaccaattattcataatatcttctacagtttttatagaattcctgtttaacaagtttcttttatataagtcttaagatacacatctgcataaaaacaaatatatgtataagaacaacaaccaatatatatatatataatatgcgtatcagaattactaataagtttatataccaattgtatataatattttattttatattatgtaaaagagtaatgaattgttctttgaaaactagataacagtaattgctgaggaaaagtgaaacttttctttaatcaaaccaataaataacacaacaatatgttgtaccatttattcgctaatggttaagttagaaagggcgcnnnnnnnnnnnnnnnnnnnnnnnnnnnnnnnnnnnnnnnnnnnnnnnnnnnnnnnnnnnnnnnnnnnnnnnnnnnnnnnnnnnnnnnnnnnnnnnnnnnnagttgggactttgtccctgtgagagtaggacgttgccaggcttatatatcggaggattagctcagctgggagagcacctgccttacaagcagggggtcggcggttcgatcccgtcatcctccaccatttgccggtgtagctcaactggtagagcaactgacttgtaatcagtaggttgggggttcaagtcctcttgccggcaccagtttttcgagccattagctcagttggtagagcatctgacttttaatcagagggtcgaaggttcgagtccttcatggctcaccatttatattcacacgcgggtgtggcggaattggcagacgcgctagannnnnnnnnnnnnnnnnnnnnnnnnnnnnnnnnnnnnnnnnnnnnnnnnnnnnnnnnnnnnnnnnnnnnnnnnnnnnnnnnnnnnnnnnnnnnnnnnnnnttgggaccaaggggtcgcaggttcgaatcctgtcttcccgaccatttatggggccttagctcagctgggagagcgcctgccttgcacgcaggaggtcagcggttcgatcccgctaggctccaccaatcggaattttgaactttgaaaactgaacaaagcgacaaacgtcaacgttaaattttattttttaattgagcaagtcaaacatttcttcggagagtttgatcctggctcaggatgaacgctggcggcgtgcctaatgatgattggggtgaagtcgtaacaaggtagccgtatcggaaggtgcggctggatcacctcctttctaaggatttttatatgacgtacgttttgatactttgttcagttttgagagttcaatctctcaattatagaaagcacactactttcttcttattcaataagaagaattttggttgcgattgttctttgaaaactagataacagtaattgctgaggaaannnnnnnnnnnnnnnnnnnnnnnnnnnnnnnnnnnnnnnnnnnnnnnnnnnnnnnnnnnnnnnnnnnnnnnnnnnnnnnnnnnnnnnnnnnnnnnnnnnnctagtaagatccctgaaagatgatcaggttgataggtcagaggtggaagcgtggcgacatgtgtagctgactgatactaatcgatcgaggacttaaccagactttaaaagcgtaagctttactcagcaaactgttatctagttttgagagaacaaaacttttcgaaaaaagtcttgctttcttttgaaaatcatgtataatataatatgtctggtggcgatagcgaagaggtcacacccgttcccataccgaacacggaagttaagctctttagcgccaatggtagttgggactttgtccctgtgagagtaggacgttgccaggcacctgaaaaaggactagctattttagctagtcctttttttattattcacagagtataagctatctacataaaatggggtaaatgaagtgcataaagaagttatatcttgtcgatacttatttagtggaggtggagagtaatggaaaaacaaattaaaacatgttccgtttgtcatgaacagcatacaaagggtattgaggtgttttccagctttatatgccaacactgcgaggtagagattgtagaggtggattcatctcattttcgttatcaattgttagtaaatcaattaaagagaatatcaggagtgttttcttactaaaagcccttttttataagggcttctttatatggctcaaaaaaatcatctaagtttgttataatgaaagaaaaatgaattttgataggaaaaatacttacatattcttttatcaagttagcaatgttatatttacaaaagtaaggaatggatgtatggatacatatttacctttatataaccgtttagtaaggcacagcgaaaagaggtcactctcttatcacgtgcccggccataaaaatggtcaaattctaccttcacatattcagtcttcttacgcagactttttgcaatacgatctaacggaaattagcggattagatgatttacatgaagcagaatctgttattaaagaagcacaagagttaacggcaaagttgtatggagtagatgaaagcttttttttagttaatggttctactgtaggcaatctcgccgcgattttatctctttgtcatgaaggagataaaattgctgttcaaagagattctcataaatctatttttaatgctattgctttatcaaaggcatcacctatttttttagctcctgaaatagattccaaaacacatcttagtacaggtgtatccattaaaacaattaaagcagctttagagggttctcaggatataaaagcatttgtattaacaaatcctacttattacggggtggcgcgagatctaaaggagatcattgactttattcatggctacaatattcctataattattgatgaagctcatggagcccattttattttaggtaatccttttccgtcgtcagctgttacgtatggagcggatcttgttgttcagtcagcacataaaacgctgccagctatgactatgggttcttatttacatatgcaggggacgttgataaataagcaaagcgttcggcatcacctacaagtactgcagtcaagcagtccctcataccctattatggcttctctcgatttagcacggtattatctgcagcagtttactcagtatgatattgatagaatgactgaaaatattcattcgtttgttgaaaagattaatgagattgatacactttcaactattgatgtggaaacagatcaaactgctaccgaccttttgaaaatgacgttgacttgttcggctgcaacaggatatcatttgcaaaaggaactggaaaagcaagatatttatacagaactagctgacgttaactatgtattgtttgtgctacctttaagcagcagttgggattttaatgatacaattaagcgggttagacaagcagtagagaatatacagcgtaagtcatacgaaaaactaataatcaaaccatttcgtttttcaaaagcaacggttctcctgcctatggaagaaagaaaactaagaacaaagcatatgtgttcttttgaagaagcgattgggcgtgtaagcgcacaatctgttattccatatcctcctggaattcctattttaatggagggagaaacgattacaagcaatcatattgactatattttgcatattcaaaggttaaatggtcatattcagggcggctcttgtatggaagaaggaaagatagaagtatttaaatagagaaaggaatttatatacatgtcaggaacgtttattacattcgaagggccagaaggtgctggtaagacgacgatcatccacatggttcaacaaaaattaatacaagagggctataatattgtattaacaagagagcctggaggcatacgaattgctgaacaaattcgtgaaatcatcttaaatccatctaacacggaaatggatgccagaaccgaagcgcttctttatgctgcggctagaagacaacatcttgtagaaaaagtgattcctgagctaaataaagggaatatagtattatgtgatcgttttattgatagctcacttgcttatcaaggaaatgcgcggggtataggcgtagaagatatttttgctatcaatcaatttgctattgagcaaacgatgccacaggccactttatattttgatattgagcctgaggtagggttagaaagaattaataaaggtcgaaaagatgagattaatcgattagatttagaatccttagactttcattacaaagtacgagatggatatttatctcttttgagtgaatttccagagcgtattcgacgaattgatgcaaatcaatccgttgaaaaagtctgtgaagaagcttataaacaaataaaattgattttaaaataaatacagatgatcgttattcttgctatactattcttaacaaaaaagtaaaatgaggtgttattcatgaaattagtaatggccgttattcaagattcagatagctcaaagcttttaaatgcacttgtagaaagagggtttcgttcaaccaaattatcaagtacgggcggatttttaaaatcagggaatacaacaattatgattggtacagatgatcataaagtagatgaagtacttgatattattaagggccaatgtgaaaaccgcaggcagatgatttctcctgtggcaccgatgggcggtaatgcagattcatacattccgtatcctgttgaagttgaagtgggcggagctacagtattcgtactaccagtagatcaatttcatcaattttaagagagaagattttaaatagaaagtgatgattgaatgggaaatacatgggaacagcttgaagctcttcagccgaacgtattaaagattttgcaaaacagcttacttaaagagcgagttgctcatgcttatttatttgaaggaagcaaaggaacaggtaaaaaacaaattagttttttgtttgctaaagcgctgttttgccaaaatccagttaatcataggccatgccatgagtgcagtaactgccggcgaattgattcaggtaatcatccagatattcacttgattgagccagccggtttatcgattaaaaaagagcaaattcaatttttgcaatcagaattcacaaaaaccggtgttgaatctaataaaaagttatatattgtgaatcatgttgataaaatgacagtaagcgcagcaaatagtttactgaaatttttagaagagcctggcaacggaacttatgcaattttattaacagaaaatatacagcgcttattagatacaattatctcacgttgccaagtaatatcatttcgatctcttacaccagaacagttagctgaaaaactagtagaaaatggcctttccggagtagatgcgtccatcttgtctaatttaacaaacagcattgatgaagcaattgaattaagtaaagatgaatggtttggacttgcaataaagttagtgatacaattatatgaagtgttaacaacgagacctcaacaagctcttctttttattcatgaaaagtgggtagcacattttaaagaaaaagaacaagcacatattggtttaactttattgatgcttctttatcgtgatttgttgacgctgcaagttggacaagagtctaaaatcgtctatcgtcataaaatagaagaattaaaacagcaagctcttcagacaacgcaggaaaaagcgatttatcgcttagaggttatcttgaaggccaaaaataaattaaattcaaatatgaatctacagttattaatggaacagctggtgttggatttgcaggagggataaaagcttgtatgatgtagtaggcgttcgctttaaaaaagcgggaaaaatatattattttgaccctggagaacttacaattccagatggtgagtttgttattgtagaaacagttcgtggtgttgaatttggcagagtggttattaataaaaagcaagtaagtgaacacgatgtcgtacttcctttgaaaaaagtaatccgcattgccgaacaaaaagacaggctgattgtggatgaaaataaacaagctgctagagaagcgtatgatgtatgcgtgcaaaaaattcaatcacacgatttagatatgaagttagtagatgtagaatatacgtttgatcgtaataaagtcattttttattttacagcagacggccgtattgattttagggagttagttaaagatttagctgctattttccgtacgcgaattgagcttcgtcaaatcggtgtacgagacgaggcaaagctgttgggcgggataggtccttgtggacgtatgctatgttgctcaacgtttttaggtgattttgagccggtttctattaagatggccaaagatcaaaacctatcgcttaatccaacgaaaatttctggtttatgcggacgtttgatgtgttgtttaaaatatgaaaatgatgagtacgaaacggcaaaagaacagcttcctgatataggctcaacaattaaaacttcagatggttcaggacgtgtagtgggtttgaatattttggaaagaattattcaagtggaactgtcagatcacgaacaaattttagagtatactctggatgagatcaataatgaaggtgctgtttcgtttcaagccacagattaacgaggtgggcaaaggtggataaaaaagagatttttgattcggtgacaaacatggaggaacaaattggtcatttatataagcagttaggtgagttgaaagagcatcttgctgagctaattgaagaaaatcatcacctgcaaatagaaaatgatcatttgcgccgtcgccttgaccagacaaacttcgaaacgaagctgaaaaatagacattcaaaagcaagcgctcaaacaaaagagcaaaaacaaattgatatcggagaaggatatgacaatttggctcgcctttaccaagagggttttcatatttgtaacattcattatggaagtgtgcgtaaagatggagactgtttgttttgcttgtcatttttaaataaaaagtaacaacacctctcccttttggagaggttctttttatgagtaaaagatataaataatagatgtacaaggagaagaacgactatggttgagttatatggagatgaacgtttagattatctattagcggatgaggagatgcgcattattcaaagtccgtctgtcttttccttttcattggatgctgtgcttttatctcactttgcttatgtcccaattcgtaaaggtaacttggttgatttatgttcaggaaacggtgtaatccccctgtttttatctaaacgaacgaagggaaaaatcattggtgtagaaattcaagagcggctacacagtatggcgcaaagaagtattgcgtataatcagctcgatgggcagattaaaatgatacatggtgatttaaaaaatgcgcctcaagaactgggttatggacaatatgatgttgtaacatgtaatcctccttatttcaccacatccaataaagaagagataaatgaaaacgaacattttgcaatcgctcgccacgaaatttattgttcgttggaagatgtgattagagccagtagccaactagtgaagcaaggcggaaaagtggcattagttcaccgtccaggaagactattagatatcgttacgttaatgaggcagtaccgtttagagccaaagagacttcagtttgtctatcctaaagatgggaaagaagcaaatacacttttaattgaaggtacgaaggatggaagtccagatttaaagattcttcctcccctggtggtctaccaagataatgatgaatacacggacgaattaaaaaggattttatatggaacaaaataatcattatttttatgtagttgaatgcaaggactgtacgtattacgctggttacacgaataatttgcaaaaacgtatttctgtccataatgaaggaaaaggggcaaaatatacgagagcaagaaggcctgtttcattaatttggcatgaggtgtttacttctaaaacagaagctatgcaaaaagagtattggttcaaacagttaagcagagtgcaaaaacaggcttacattcgaagggagcaagaaaagcagaatgaaatcacaaaaaagttatgatgtatcgaatgaacgaggcgttttatatttagttcccactcctattggaaacttagaggatatgacatttcgtgcgattcgaattttaaaagaagttgattatattgccgcagaagatacgagacaaacgaaaaaactatgtaaccactttgagatcgatacgcctattacaagttatcatgaacataataaacatacaaaaagtgaacagctgttaagcgacttagacagtgaaaaaaatattgctttagtaagcgacgcgggcatgccttgtatttcagatcctggttatgagttagtggtagctgccgttaaagaaggatatacggttgttccgctgccggggcctaacgcagcattaacagctttaattgcttcgggactacctacggggcagttttacttttatggatttttaaacagaaataaaaagcagcgtaaagaacagcttcaagagcttcaatatattaaggaaagcatgatattttatgaagctcctcatcgattaaaagaaacgctaaagagtatagaagaaattttagggaaccgatctattgtgttatgtagagagttaacaaaacgctatgaagaatttttaagaggaagtgtattagaagcaattgaatggacaaatgccacagatattagaggcgaattctgcttaattcttgaagggacaaatgaagaagcgccagatgaaagtaatctatggtgggaacagctcaccattatcgagcatgttgatcactatgtagaagaaggactttcaaacaaagaagctattaagcaagtggcaaaagaccgagatgtgtcaaagcgagacatttacagtgaatatcacgtacattaaaaaaagctgtctatcatagacagcttttcgttttatttagaagcttgtaaagaatcttgaagttctttcatgatttgttctgcaccttcacggcttagaattaatttgccgctagcaagctgaatgttatcatcagatacttcacctgttacttggcaagtcatgtttggtttgtatttttttaagatgatgcgctcttcatctacatagatttctagagcatctttctctgcaattcctaatgtacgacgtaattcaattggaattactacgcgtcctaattcatcaactttacgaacaatacctgtagatttcatgttaatcgttctcctctcagtaatcatttttctatgttattactttcgtcattattcgacaatttcaacgtactttcataataccagcgtttccaaaactagtcaatcattttatatgtaaaaaaatgtagccggtaaaaaaattttttctccacttgtttacaagctaattgtgaccgtcagtcaaggaatgacaaggggtttcattggaaaaaagattaatcgcttaaatagcttgatattaactattttgaagatagggtaaatataattcgacataaaacgacaaaattagacctacttgtcgttttcatcaaaatgactttttgaatgagagtatattttatataaaaatagggcgaagctgatacaattaacaggattattttttgggaaaataacgattatttaaaaatgaagtgaatccgtcatattcccatgtatataggaagagaatgttttgaaattatcatgtaaaatagtatgatagatagtagaataagaagacagggtttatatgattacatacatataaaccaaaatgttgaaatggaatgttggaggttatgaacatggcagatggaaataatacattttatattactacgccgatttattatccgagtggtaaattacatataggacatgcatacacgacggtagcgggagatgcaatggctcgttataaacgtttgagagggtttgacgtacgttatttaacaggtacagatgaacatggtcaaaaaatccagcgaaaagcagaagagaaaaacgtgacacctcagcaatacgtagatgatattgtatctggaatcaaagagctgtgggataagatggatatttcgtatgatgattttatccgtacaacagaaccaagacataaagaaatcgtggaaaagattttcgcgcgccttttagaacaaggtgatatttatcttgatgagtatgaaggttggtattcagttcccgatgagacgtattatacagagcatcaactagtagatccaatcgttgaaaatggaaaagttgtaggcggaaaaagcccggatagcggacaccctgtagagctcgttcgagaagagtcctatttctttaaaatggggaaatacgtagatcgtttactagctttttatgaagaaaacccttcatttattcaaccagagtcccgtaagaacgaaatgatcaataattttattaagcctggccttgaagacttagctgtttctcgtacgacgtttgattggggggtaaaagttccaggtaacccaaaacacgttatttacgtatggattgatgcgctttctaactatatcacctctcttgggtatggtacagagaacgatgaaaactatcgaaagtattggccggctaacgtacatttagtaggaaaagaaatcgtacgttttcataccatttattggccaatcatgttgatggcccttgatttgccacttcctaagaaagtatttgctcacggctggttattaatgaaagatggaaaaatgtcgaagtcaaaagggaatgtagtagacccagtgacattgattgaccgctatggattagatgcccttcgttactacttacttcgtgaagttccattcggttcagacggtgtattcacaccagaagcgtttgttgaacgtattaattttgacttagcaaatgaccttggcaacctagttaatcgtacagtggcgatgattaataagtattttgatggtgttattccgacttatgaaggcaatgtaacagagtttgatgcacttatcgtccaagctcaaaaagatacagtgaacaaatatgaagaagcgatggaagatatggagttttcagtggctcttgcttctatctggcaatatgtaagccgtacgaataaatacattgatgaaacgcagccttgggcgttagcaaaagatgagaataagcgtgcagaacttgcttctgttatgacacatctagctgaatcaattcgtcacattgcggtattgctgcagccattcttaacacgtacacctgagaaaatttttgctcagattggtgtaaaagaagatgtattaaaaacgtgggaaagcacgacgcgttttaatatgcttaaagaaggcacaaaagtagaaaaaggtgagccaatgttccctcgtctagatcgagaagaagaggtagcgtttattaaagagcagatgcaaggaagtgctccaaaggaagaaaaacctgttgtgaaggaagagccttctgaagagattacaattgatgatttcatgaaagtagagcttcgtgtagcgcaagttacgcaagtagaaccagttaaaaaagcagataaactattgaagcttcagcttgatcttggctatgaaaaacgccaggttgtatcaggtattgccaagttttataagcctgaagaattagtaggtcgaaaagtaatttgtgtaaccaatttaaaacctgtgaaactgcgcggtgaactatcacaaggaatgattttagcgggtgaagatgagaatggtctttcactagcaagcgtagatcaaaacttagcaaatggcacgaagataaaataactataggtaaaaggggtgtttcacgtgtaacatgcgaggacccccttttattcatggaaaggatcgattagatgttatttgatacacatgttcatttaaacgcagaacagtatgaagatgatttgcaagaagtaattaatcgtgcgttagaaaaaggtgttcaaaacatggtagttgttggattcgatgaacctaccattaaaaaggctattcaaatagctgaaacgtatgactttatctatgctagtgtagggtggcatccagtagatgcagttgatatgacggatgagcacttagcttggattgaaaagttagctcagcatccgaaagttgttgctttaggggaaatgggattagactaccattgggataaatcacctaaagaggttcaaaaggacgtatttcgccgtcaaattcgcttagctcgcaaagtgaatttacctatcattattcataatcgtgatgcaacagaagacgtggtaaccattttaaaagaagagcacgtagaagaagtaggcgggattatgcattgcttcacgggcagtattgaagtagcgaagcagtgtatggatatgaatatgtatatttcttttggcggacctgttactttcaaaaatgcgaaaaaaccaaaagaagttgctacagagcttcctttagataaactattaattgaaacagactgtccttatctgactcctcatccattccgcggcaagcgcaatgaacctggttatgtttcatacgtagcagagcaaattgcagagttaaaaggtataacgtatgaagaattagctgatattacaacagctaacgctaaaaagctatttggcattaatgattaaaactttttctcatataacaatcattttcgtgttaaagtaaagataggcgcagaggagaatgttatcctctgcctttttcagttaaaataacaggtagatgttttttaatttagttgataataagataaaacgttgatttcatagaagaaaaatgatgtgcgcaactagcatttcatttttactgaaaagcaaatgaacaaaactgaatgttttggaggaagcaatgaagattaaagaaattattgtagtagaaggccgagatgacactgtagcaattaaacgtgcagtggatgcggataccattgagacaaatggatcagctgtaaatgaagaaaccattgagaaagtaaaattagctcaaaaaacacgaggcgtgattatttttacagatccagattatccaggacagcgaattcgaaatattgtttcagaacgtgttcccggatgtaaacatgcattcttagataaagaagaggctcgccctaaaaatggcaaaggtattggagttgaacatgcttctattgcatctattcaaaaagcactaaaagatgtgaagcaagagtggatgggggcagctatggagatttctcaagaggatttaatcgtagctcgtttgataggagatagtaaagccaagtctcgacgtgaaagaataggcaagttattaaaaattggttatgccaacggaaagcagctccataaacgattacagatgttccaaatttcaaaagaggactttatcagagctgttgagcagataaataaggaggaaaagggatcgtgttaaaagatattgcaacgcctaatcgaaccaaggaaattttaaagaaatacggttttacatttaaaaagagtttgggacaaaattttttaattgatacgaacattttacatcgtattgttgatcatgcggaaataacagaagaaacgggagctattgagattggacctggtatcggggccttaactgaacagctagcaaagcgcgcaaaaaaagtgctggcatttgaaatcgatcagcgtttgcttccgattttagctgatactctttctccttactcaaatgcaaaagttattcatcaagatgtgttaaaagcggatttaaaagggacgctcgaacaagaattcgaaaacatagaagatttaatggtcgttgcgaatttaccgtattacgtgacgacacccattttgatgaaattattagaagagcaaattccggtacgtggaatcgtcgttatgcttcaaaaagaagttgctgaacgtatagcagctaaaccgggaacaaaagagtacggttcactttctattgctattcaatactatacagaggctgagacggttatgattgtgcctaaaacagtgtttaatccgcagcctaatgtggactcagctgttattcgattgttaagaagaccgaagccagcggtagaagtccgagatgaagcattcttcttccaagttgtacgggcaagtttcggacagcgtcgaaaaacaattttaaacaatctagtgaacaacttgccaaatggaaagcagaaaaaagcggacattgagcaagcactttcaactgctgaaattgatccgaaacgaagaggcgaaacgttatctattcaagaatttggaaagctaagtgatcaacttttaaaatcatttcgctaaattatcacatttttatcatgaagtcataggctatgaagagaatttatttttgaagtagcaaagacggagtgaagcatatgaacatcaaaattggtgatatagttacacgaccttcttatcaaagagatttgctttttcgtgttatagctattaatgacagcgaaacggggaaatatgcgactttaataggagaagacgttcggttgattgcggacgctccttgtacagatctagaggttgtggatgctaaagaacaggatcaaagaaaaaaacaagaagaagaacttttagaaagatccttggagcttattcaacaggattatcggctcgttcgagagaaaactgaatatagcatgacaaatggatacagccattcacatcgcttatttcaaattccaggaaaggtcctgcacgtagacggagaccctaattatttacgtaaatgtttgttggtttacgaaaaaattggtgttcctgtttatggtgttcattgcgttgagtcagaaatgcctgagaaggttggaaagctaattgaggatgtaagacccgatattctagtgctgacaggtcatgatgcctattccaaaggaaaaggaaataaagatgatctccttgcttatagacattccaagcactatattcaaacagtccaagaagcaagaaaaagagttggtaatttagatcagctggtgatttttgcaggtgcctgtcaatcgcattttgaattattgattcaagctggagcaaactttgctagttcaccctcacgtgtaaatattcatgctcttgaccctgtgtatgtagtagcaaaactaagttttactcctttcacggatcgtattaatgtatgggacgtcttacgtaatacattaacgggtgctaaaggtttaggaggagtagaaacaaaagggctgcttcgcacgggcatgccttatgaaagcgatgagtagaaataaaaacaactggttacagcatgtacacgcatgatgtgcaaccagttgttttttcgtatgaagccaaagtatacgcttaattacacaaaatcattttcaatatttgctaaagatatacatatttcgttgaaaaacgagcatactaacagcgaaatgtagattcatgttgaaaattatttattgacacaattagagatagattgttataattttatgtttttgactatttttctaacatgtgttatactatacatagtgaggtggaccaatatggcgaaaactttgtctgatattaagcaagcgctggatttgcacctaggccaacgattaactttaaaagcaaacggtggtcgtagaaaaacagtagaacgttcaggtgtattaacagaaacgtacccatctgtttttatcgttgaattagatcaagaggaaaactctttggagcgggtttcgtatagttacgcagatgtgttaacggaaacagtgcaactaaaatttttctaagaatgacataggcaatatagcaagtggtgatgagcagtggacattggtttactgcttttttattggtctttttttcaaattatatatgcattattttttatacatactatacatatcgtcctcgcgtttcttatgtaaaagagcgaggagattcaggttgaaatttcattttatacgtaaaggagccatgtgcaatgtcaaggcgtagagggattatgtcatcgaagctgaaagaagaactggctaaagaacttggtttttacgatactgtacaagcagaaggctggggcgctattcgggcaaaagacgcaggcaatatggtgaagcgagctgtagagcttgcacagcagcagctaaagcaatagcatagtgaaaatcaatgcttatacgactatttaaagtgaaatgaggaaaaccgaagtgtataaccgcttcggtttttttgtcccaaaatgaaagataaaacagaggattaaacaaagatgtttaaatgaacagctatatcttgttcattttatgataaaatagcgttaaactcgataagatgaagtaggtgaagtaagttgaaattaatggtgaaagcaccggctaaaataaatttgtcacttgatgtgttacataaacgtccagatggttaccatgaagttaagatgattatgacaacaattgatttagcggacagaattgaactttctgaccgtgaagatggacgaattgttatctattctcataatcgctttgttccagatgaccagcgaaatctcgcttatcaggcagcgcagattttgaagcgacgttataacatttcaaaaggtgtaaatatattaattgataaacatattccagtagctgctggattagctggaggcagcagtgacgcggctgctacattacgcggtttaaatacgttatgggaattagggttgtcattagacacacttgcacaaataggggctgagattggctctgacgtatctttttgcgtgtacggagggacagctcttgctacagggcgcggagagattgtagagcatattgaggcacctccaagctgctgggtgattttggctaagcctgaaataggtgtttctacagcagatgtatatcgaaacttaaaaattgaagagatggatcatcctaaagtagatgagatggttcacgccatacaatcaggaaattatgatcaaatgtgtagccttgtaggaaatgtattggaagcagtaacactgaaaatgcatccggaagtagctctcattaaagaacaaataaagcgttttggcgccgatgctgtgctcatgagcggcagtgggccaactgtatttggacttgtacagcatgattcacgtatgcatcgcatttataatggattacgtggcttttgtgataaagtttatgcagttaggctattaggtgaacgaataacgcttgaataaatccgtatgttaatgttatatttacattacaatattcggattttcaggaggatgttatgaagtttcgacgtagtggacgattaattgatatgaccaactatttcattcaaaaccctcagcgccttatccctcttacgtattttgcagataaatatgattccgcaaaatcatctattagcgaagatatggcgattattaaacaaacttttgaacagcagggtatcggaactttggttacgctaccaggggctgccggcggagttaaattcattccaaagatgacgaatgaagaagccggtcagcttgttcaagaattatgtgggttgattgaaaaacctgagcgtttactgccaggtggatatttatatttaactgatattttagggaacccccgcgttgtgaataaaatcggtcgcttgtatgcatcgctttttgctaaccgcaaaatcgatgtggtgatgactgtagcaacaaaaggtattcctattgcgtatgcggttgctcagtatttagacgtgccggttgttattgtgcgcagagacagtaaagtaactgaaggatcgaccgttagtattaactacgtgtcgggttcatctaagcgcattcaaacgatgctgttagctaaaagaagtttagcggtggggtcaaatgtactcatcattgatgatttcatgaaagctggcggtactgtaaatggaatggttagcttgcttgaagagttcgatgcaactgttgctggtattggagttttagtagaatcagaagatattgaagaacgtttagtggatgagtatgtgtcccttgtacaattaacagatgtaaatatcaaagataaacaaattcgagtacaagaaggcaattacttaaaatatatttgatcaagtaagggagaggaacatatgttacaggttcaaacaaaaaatgcaccgcaagctattggtccatattcacagggaattgttgtgaataacttgttttacagttcaggtcaaattccacttcgtccagatggtacgttggtcgaaggagatgttcaagtacaagctactcaagtatttgaaaatctaaaagcagttcttgaagaagctggagcttctctaaatacagttgtaaaggcaaccgtgttcattaaagatatgaacgacttcgcagcgttaaatgaagtctatggcgactacttcggggaccataagccggcacgttcatgtgtagaagttgcgagactacctaaagatgtacttgttgaaattgaagttattgcgcttgttaaagggtaattaaattaacaaatttctaacaaaaagcaagtaacttccaattgttcactttttttgcgaaaattttctaaaaattttttctgaatagcaggaaaacacaaaattctgtggaattaagtatgtaaagcttcgcatagaaaaaggtggtgaacaagatggaagtaactgacgtaagattacgccgcgtgaacactgaaggacgtatgagagcgattgcttcaatcacattagatggtgaatttgttgttcatgatattcgtgtgattgatggtaataatggcttatttgtagccatgccaagtaaacgtacaccggatggtgagttccgtgatattgcacatccaatcaattcaaatactcgcggaaagattcaagatgctgttttagcagaatatcatcgtttaggtgaggtagaagttgaattcgaagaagcgggtgcttcgtaaacatatgatacattaagagtctactgaaaagtagactcttttctttttgattaccacttatataatttcacacctttgtaaaactttagcattaccaaaaaataaaattcatgacttataaatgattccttgaaatgctgtcatttttgatataatattcttaatggataaaaaggtaaaattggaggcctgttatgtcaaaaagatatgcagtcatattggcagctggtcagggtacacgtatgaagtcatctttatataaagtgttacaccctgtgtgtggcaaaccgatggtgcaacacgtaattgatcagttatcacgtttggatttaacaagtttaattacagttgtaggtcacggtgccgaaaaagtgaaatcacatgttggagataaaagcttatttgctttacaagaagagcagttaggaacagctcatgcagtaatgcaagcagaatctttacttgcacatgaaaaaggtacgacaattgttgtatgtggagatactccgcttattacagctgaaacaattgaatctttattaaagcatcatgaagcaacaaatgcaatggcaactattttaacagctcatgcagaagatccaacaggatatggacgcatcattcgaaatgaacaagggtctgttgaaaagattgtggagcataaagatgccacagaacaagagcgtcttgtacaggaaattaatactggtacgtattgttttgataatgagaaattatttgagacactttcaaaagtttcaaatgataatgtacagggagagtattatttacctgatgttatcgaaattctaaaaaatgaaggtcaaattatttctgcatatcaaacatccgattttgctgaaacattgggcgttaatgatcgatttgctctgtctcaagcagaagaaacaatgaaaaagcgcatcaacaagcagcatatgttaaatggagtgacgattgtggatccttctaacacgtacatttcagcagatgctgtcattggcagagatacggttatttatcctggtacggttattcaaggaacagttgtaattggagagaattgtgaagtaggacctaacagtgaaattaaagactgcaaaataggtaataatacttctattcgccattctgttgctcacgatagtgaaattggtcacgaagtcacaattggcccatttgcacatattcgtcctcaatcattaattggagatgaagtgcgcgtaggaaactttgtagaaattaaaaaagcatcttttggcaaaggtagcaaagcttctcatttaagttatattggagacgcagaggtcggaaaagatgtaaacttagggtgcggatctattacagttaactacgatgggaaaaataaatttttaacaaagattgaagatggggcattcgtaggatgtaactcaaacttaattgcacctgtaacaattggtgaaggcgcctatgttgcagctggttcaaccgtaacggatgatgtgccaggaaaagcattatcaattgctcgtgcgaaacaagtaaataaagaaaactatgctgaaaagcttgatattaataaaaaatcctgacggaggtttcacaataaaatgtcaaatgtatatgctgatgaaaatttaaagttatttacgctaaattcaaacaaggctttagctgaagagatcgcaaaagtaattggtgtggaattaggtaaatgttcggttgatcgtttcagtgacggtgaaattcaaattaacattgaagaaagtatccgtggttgtgatgtatttatcattcaatcaacaagtgctccagttaacgaacacttaatggaattattaattatgattgatgcattaaaacgtgcatcagctaaaacaattaacatcgttatgccttactatggctatgctcgtcaggatcgtaaagctcgtgcacgtgaaccaatcactgccaaattagcagcaaatatcattgaaaaagcgggagctactcgtattatcacattagatttacatgctcctcaaattcaaggtttcttcgatattccaattgaccatttagtaggtgttccaattttaggtgaatacttcaagagtaaaaaccttgatgacgttgttgttgtatctccggaccacggtggcgtaacgcgtgctcgccgtttagcggaacgtctaaaagcgccgatcgctatcattgacaaacgtcgcccacgtccaaacgtagcagaagttatgaacattgttggacaagtggaaggaaaaacagcaatcttgattgatgacatgattgatacagctggtacaattacaattggtgcaagtgcattaattgaagcaggtgcaaaagaagtatatgcttgttgtacacacccagtactttcaggccctgcgattgagcgtattcaaaactctacaatcaaagagttagctgtaacaaactctattgctttaacagaagataagaaaattgataaagtaacagaactttcagtagctccgttaatcggtgaagcgattattcgtgttcacgaagagcaatcagttagtacattatttgattgataaacagaacctctttccatttggaaagaggtttttttgaaaaaaatttaaatgtgccaacccttgattttaaagcgctttggatggaatgcacaaagatatattactgttcaaactgggtttcatgtttagcaaccttctaaaaagggtacattttaagtagaaaacatactggaaggtgaataaaatgagtatttcaattcaagcaaataaaagaacggatttcaaaaattctacaaatagaaagattcgcgacgaaggaaacttcccagcggttgtttacggaaataaaacagaatccacacctatttacttaaacagtgctgattttattaagactattcgtgaagcaggacgcaatggagtgttaacgttacaagtggataagcaaaaatattccgtaatgttacatgatattcaaactgatccattaaaaaacgaaattgtccacgccgatttccaagtgatcgacatgaagaaagaaattgatactgaagtttctttatctctagtaggagaagcaaaaggaacaaaagaaggcggcgtattacagcagtctttatatgaaatttcattaaaaggcttgccgcaggatatcccatcgtctattgatgtagatgtatcagagttaggaattaatgatacaatcacagtagcggatattaaggtaggtaaaaagctggaaattacgcataatgcagaagatacagttgcttctgtgctacctcctcaacaggaagaagagccggacagcggcgaagttcaggatgctgaaggcgatgttgaagcaacaaaagaaaaaaataacgaagaataatataaaaagacgtaaccaaaaggttacgtctttttatgtgaattgattataataaaagtgatactatatagtaatgtaaaacattaaagacatttacctattatgtacaacttacatagagtggaaaggagtatctattttgaaattaatcgttggtttagggaatcctggaaaagaatatgaccgtacccgtcataacataggatttatggcaattgataaaattgctgaacagtttatgatttcactagataaaacaaagtttagcggaatatatggaacaggtataataaaaggagaaaaagtcatattattaaagcctctaacatatatgaatttatcaggagaaagtattcgcccgttaatggactattttgatatagacgtcgaagacttgcttgttatttacgatgacttagatttaccgtgcggaaaagtaagattgcgtacaaaaggaagtccgggcggccataacggaataaaatcaattattcagcatttaaaaacccaagagtttaaccgaattcgtattggaatcgatcgtccgaaaaacggtatgaaagtagttgattacgtactagggcgctttacagaagatgaaatggttcatatggaagaagcgatgaaaacgtctatacacgcgagtgaagattttttaggtaaaccgttcttagaagtaatgaatcgctataattaagtagaataaaatttctctcaatcgtccatactaacactaaaagatttgggaggatttgtatgtctattcattatttctgtagacattgtggcgcaaaagtcggtatgatagaaaagacagctcacaatacagaagcactcggttttaatcacctaaccgcagatgaacgaaaagactttattcactaccataatagtggagatatcgtggttaaaattatttgtgaagactgtcaagaagcgctagaacgaaatccagactatcatcagtacgaaacatttatacaataaaaagctttggtctcaaaccaaagcgtttttctgtttagtttagacatatcatgggaggagggaattcctttgcgagggattagacagcaatttgaagaaaataaagaaattggagctgttgtcagcagcttagaagaaggtttgaaagaacagttagtaacgggaatttccggttcagctcgatctgtattaatggcactcttaaatgaggataaaaaataccctttattagtagtgactcataatttatatcaagctcaaaaagtgtatgaagaccttttgcatcttttaccggaaaaagacgttttcttataccctgttaacgatttagttgctacagaagtggggattgcaagtccagaattaaaggctcagcgaattgaagtactcaattattggagtcaacatacaggtggagtagttgtaacaccgcttgcaggaattcgaaagctgctgcctcctaaagcaagatgggagcaaacacagctgccgtttcaaatgggaattgacatcgacgttgatcattatttaaaaaggttagttgagttgggctatgagcgggcatctatggtttcagctccgggtgagtttagtgtgcgcggaggaatcattgacatttatccgttaacagaagagctacctgtccgaattgaactatttgatacggagattgattccattcgtacttttacaatcgaggatcaacgctctcaagagcagttaaaagaaatttcaatcggtcctgctacggaaatcattgtgaaccaaaatgaagtggcccaaggaattgaagaactagaagcacagctggcttcgacgctgcaacaagtaaaaaacgcagcgctaaaagctaccttaacagaaaatattaaaggtgaaatcgaacagctgcgtcaaggtcagcttcttgaaaatatgttcaagtatttatcattcttctacgaatcgcctgctagtttactagattatttaccagaaggcggccttgtcatctttgatgaaaccactcgaattcaagaaacgtctgatcagcttgaaacagaggaagctgaatggataaccgaattattaggacaggggcaaattgttcgagacgttcaattatctcataagctcccatctcttattcagcgagcaaaacatcagtttttatacttatcgttatttttgaagcacgtatcgtatacgagtccgcaaaatattattaatatttcatgtaagcagatgcagcagttttacggccaaatgaacttattaaaaagtgaaattgaacgttggaaaaatgctaattatacggtagtcctcttaggagcagataaagagcgcgtgaaaaaacttgaaggtgtactagcagattatgatattgattcatctattttagatggaaatggtcagcttgtgccaggtcttgttcaaattattgaaggcgatttacaaatgggctttgaactgccgatgcaaaaattagctgttttaaccgaggaagaattgtttaaaaaacgggtaaagaaatcaaagcgtcgtcaaaagctttccaatgcagaacgtattaaaagctattcagagttaaacgtaggtgactatgtcgttcacgtgaaccacggtattggccgttatttaggaatggaaacgttagagattaacggtaatcataaagattatatccatatcaaatatgaaggctctgacaagctgtacgttcctgttgaacagattgatcaagtacaaaaatatgtaggctctgaagggaaagagccaaaagtatataaacttggcggaaatgactggaagaaagtgaaacgaaaagttgagtcttctgttcaagatatcgctgatgacttaattaaactgtatgcagagcgtgaagcaagtaaaggttatgcattttcccccgatggcgatttacaaagagaatttgaaacagctttcccttatcaagaaaccgaagatcagcttcgttctgtacaagaaattaaaaaggatatggaacatgaaagaccaatggatcgtttgctttgtggagacgttggatatggaaaaacagaagtagccattcgtgctgcatttaaagctgtgacagatggaaaacaagtggctattttagtgccaaccactattttagctcagcagcactatgaaaccatccgtgagcgttttcaagactatccaatcaacattgggctattgagccgctttcgcagtcgtaaacagcagcaagaaacaattaaagggctaaaaaacgggaccgtagatgtggtgattggtacacatcgtttactatctaaagacgtgatttataaagatttaggattgttagttatcgatgaagagcagcgttttggtgtaacgcacaaggaaaaaatcaagcaaatgaaagcaaacgttgatgtccttacacttacagcaacacctattccacgaacattacatatgtctatgttgggcgtaagggatttgtctgttattgaaacgccgcctgaaaatcgttttccggttcaaacatatgtagtggagtataatccggttttagttcgtgaagcgattgagcgtgagttagcgcgtgatggccaagtttactttttatataatcgcgtagaagatattgaacgaaaagcagaagaaatttcgatgctcgtgcctgatgctagggtaacgtatgcccacggaaaaatgaatgaaaccgaactcgaagcggttatcttaagctttttagaaggcgaatatgacgtgattgtgagtacaaccattatcgaaacgggagtagatattcccaatgtaaatacgcttattgtcaataatgctgataagatgggattatcacaactgtatcaattaagagggcgtgtaggtcgttcaaaccgcgtggcatatgcgtactttacgtatcacaaagacaaagtactgacagaagtagctgaaaagcgtctgcaagctattaaagaattcaccgaattaggttctggttttaaaattgctatgcgtgatctttcaatacgtggtgccggaaacttactgggtgctcagcagcatggatttatcgattctgtcggtttcgatctctactcgcaaatgcttaaagaagcgatagaggaaagacgcgggtctgacggagaaagtgtgaaatttaatgtggaaatgaatctggacttagacgcatatattcctgatcagtacattacagacggccgcttgaaaattgagatgtataagcgctttagaggaattgaagcactagaagatattcaagaattgcaggatgaaatgattgatcgttttggagagtatccggctgaggttgagtatttgtttaaagtagctgaaacaaaagtatatgcaacgcagaacttagtagaatctattcttcagtcaaaacaagaaatttctattctgttgtctgaagaagcgagctcaacggtagacggccaaaaattattcatgctaggtgatcaattcggcagaatggtcagcttaggtatggaaggcaagaaagtaaaattagtggttaatgtaaaaggacttgctcaaaaagaatggctcaatattgtgtatcagttagtaaaaggagtagccactgttaaaaaagaacaagttacgaattaaaacaggcaagacaaaagtattttagttaaaggaaaatccgaacgatgaattgaggttcttgataaagaatccaacccgttcggatttttttattgatatggtgaatacaggtttcatgtatgtggctgcttttagatggtgattgaaggacaagacaaagactcccgcgggaaaagcggaaagcgaagtcttgcacagaaatcagcagcggtgtctcaagcggtttacctcatgtctcctagttgttcgtctttaggcgagataggtttagttatgtctcagcctctcttgtatagtcaaataaaaatatccagatccccatgttttggcggttttttggacatttttttaataaaagcacactttttaacaaaaaaagagatggttggtgaatagaagttgtagagtgaagaatactaacctcaacaaaggtgaaccttttatcatatagccatcagtgatattcaccaactattttaatcatcatatgaaagagaggcttcaatgaatgaaagcaacaggtattgttcgtcgtattgatgatttgggtcgcgttgtgattccaaaagaaattagaagaacgcttcgcatccgagagggagatccgctagagattttcgtcgatcgcgatggagaagttattttaaagaaatattcgccaattagtgaattaggagactttgcaaaagagtatggcgaagcgctatacgatagcttaggtcatcctgtacttatttgtgaccgcgatgtatttattgcggtagcaggaagttctaaaaaagaatacttaaataaaaacattagttcgttagtggaatctgttatggaaagccgcagttcttctttagtaaccgatgggaaaaaccttgaatttgtcgatggatacgaagaaaatatttcttcttatacaatcggtccgattattgcaaatggagatccgattggagctgttgtcattttctcaaaagataagtcccttggtgaagtagagcataaagccgccgaaacagcagctagcttcttatctcgtcaaatggagcagtaagcgtaattatctttattttacattatctactgaaaaggtagcagtttctgctgccttttttcatgctgtcttaccttagaaataaagagaacatgatataatggtacggtattttatttattggaaagtgcaggatgttttataagaacaaagctctattctattgcggttagcggctaataaaaagagttgttcacatcattacaagctgcaggtgaaaggtgtaggaatgcagaaacaatcaaagctctattctatttttaacggcgccattattttaacgctcgcaggtttatttacgaaaatcttaagtgccacttatcgtattccatatcaccatattgcgggagatatagggttttatatctatcagcaagtttatccgctatatggaattgcgctacagctaggtacatatggtttccctgtaattatttcaaagttagtagctgattatggggcaacaaaccggagaaaggaaatacggggaatacttcaagtttcatttgcttttttgtttgtagtaggctgcacgatatttgcgctcgaatatatctttgcagaaacaatcgccgagtggatgggagatcgggagttaacgattctcattgaaattatttcattttcctttttacttattccgtttattgctgttattcgtggttattatcaaggattatataatatgtttcctacagcgctgtctcaaatcgcagaacaagttgtgcgagtagggactattttgtatctatctattttctttgtgcaccatggatatggtccttatactacgggggcgggagcaatttttggctccataacaggcggtctaacatctcttattgttttgtttttatttgtttttagaacaaagacaaattctaagggaatgtttcaacgcataaagaaagcagacgtcaaaaaaatagtaaaagtcctggttattcaaggtttattaatttgtattagcggtatgggtctgctgtttatccagcttattgactcctttactttatattctagtctaacggcgcacggcatggctgaagaagcagcacaaattttaaaaggtatttacgaccgcggtcttccgttgattcaattaggtacagtagtaggtacagctttttcgctttcgcttgtacctgttatttcttcagccattgcgaaaaagaacttgtcatttgtggttgaaaaagttcagctgtctctccgtctatcgcttgtagtcggagttggagcagcttttggcttgattgcgctgatgaaacccattaatatgcttttatacggtgactcccacggaacggacgttttacaaattttgagcttgttagttatatttacaacagtagcagcaactgctggagctgtgctgcaggggatgggagctgttttcgcgcctgtaatagccgtcatcgctggcatggcagtcaaactgatattgaatctttggctaataccagattttcaaaccataggagcagccattgcttcctcagctggattcgctatcgttgcagcaatcaatctattttgtctgtataaaaagttagctgtacctcttgttccgaaaaaggtgagtggaggtatttttataacgggcatagcaatggtcgttcttttgcaaagctatttattttgtttacatcactttgtatggtctaatggtttagatacaagcaaacaagtggttgaaacaggagctggtgttttaataggcggtttgttttatttgtttatcattatgaaacaacacatttttaccgaagaggaattacgtttacttccaatgggaagtgttttagctaaatacgtattaaaaaataaataagaaggtgaagcaatgacaggtaaagtaacagttattggtttaggagcaggcgatttagaacagctacctgtaggcatttatcgcttgctacagcaggaaaagcatatttatatgcgcacaaaagaacatcctgtaatcaaagaattagaaagtgaaggcttgacgtatgtatcctatgatgacgtatacgaatcttatgatgcatttgaagaggtatatgaacatatatcaaatgatttaatcgataaagcttcaatagaagaagtggtgtatgccgttcctgggcaccctttagtggcagaacgtacggttcaattacttttacaaaaaggaaaagaacgaggcattcctgttgaaattaaaggaggacaaagcttcttagacccaatttttggtgcgctaaagatcgatcctatcgaaggatttcagctgctagacggaacagatttaaagcgaagcgaaatagagttaaccggtcatgttctaattgctcaagtgtacgatcagttcgttgcttcagaggtaaagctaacgctgatggaacacgttcctgatgattacctcgtttatattgtaacagcagcaggaagcagtgaagaaaaaatccagccggtcaagctgtatgaattggatagagaaatgtcgctcaataacttaacgactatttatgtgcctcccgtagcagacgaaacaattttatatcatcaatttgactcgttcagaaggattattgccacgctcagagggccaaacggatgtccttgggatcaaaaacaaacgcatgaatcgctcaagcgctatttgctagaagagtcatatgagttattagatgcaattgaccgtcaagatgacgataatatgattgaagagctcggtgatgtattgctgcaagtattgcttcatgcccaaatcggtgaagatgaaggaatgttttcaattgatgatgtcattcgcagtgtttcagagaaaatggtaagacgccatccacatgtatttggggaagtgagcgtgaatgatgcagatgaggtcttaaaaaattgggatgaaatcaaaaaagaagaaaaaggagaggaaccttcttctctgttagcttctgtacctggggctatgccttctttaatgaaagcgcatggataccaaaaacaagctgcaaaagttggtttcgattggtcagaagttgaacctatgtgggaaaaagtacaggaagaacttgctgaattccaagaggaagtacagcatgctgataaagaaaaaatgagcgatgaatttggagatattttatttgctttagtgaatattgcaaggttttataaaattgactctgaagccgcattagctaaaacgaatacaaaatttttaaatcgatttcaatatattgaagaaaaagtgagagcttctgaaaaaccatttgaatctttttcgttagaagagttagatgaattttgggaagacgccaaaaaaacaggtttgtaaaacagaaaggtgagggaattatgaggttagataaatttttaaaagtatcacgtttaattaagcgccgtacattagcaaaagaagtatcagacaagggccgtattaccattaatggtattgttgcaaaagcaagcacaaatgtgaaagtaggagatgagttagcgatcacatttggcacgaagaaaattaccgttaaaatagaggctcttcaagaagcagctaaaaaagaagaagcagctaatttatactcaattgtcaaagaagagcgtatttcatctgaagtataactgatgaaggcttgttctaaatcacctttctcattcatatgttttaaacaacagataacaagagcgaatgctcttaatgaatgaggtggggatgaagatatgagccaattttacgaaacaagcaattcaaacaaagaccatactccaaatcatgatttagtgatgaagggtcggcgtctcttagatatcacgggtgtgaagcaggtagagagctttgacaatgaggaatttttacttgaaacagtgatgggtttcttgtcagttagagggcaaaacctgcaaatgaaaaatttagacgttgatcaaggaattgtatcgataaaaggaaaaatctttgatatagtttacttagatgagaaccaatcggagaaggctaaaggattctttagtaagttgtttcgatgagtttaaacattcagctctatacaatgcttgcgatggtatcgatgggaagcggtttaggtgcttctctcgatacttatcgttactttgttaatcgctctaaatcacgcccatggtttgtatttgtgaatgacgtgttgttttggatggtgcaagctcttctcattttttatgtgttgtttttagtgaatgaaggagaactgcgtttgtatgcgtttcttgctttgttttgcggctttgccgcgtatcaaagcttatttcaatcactgtatttaaaagtattaacatttactgtctcgagcgtattaagtttatatcgaggtgttctaacgcttagtaatatttttttggtcaagcctatccgcttctttattcatattttagttgtagtcgctttagggatctaccgagctgttcataagctgctcgtattctgtctaaagcttatttacgtaccgaccaggtggcttcttttcgtattttggagaatgatgcctaaacctgtaaaacgatttttacatatgggttttcggtatatagaaggaatttacaatcgtgcaaagaatatgataatgagaattgttgcatgggtgaacactttaaaaaacaagggggacgactaattcaatgagtgcggtacgaaaaaaaaaggtcgcgaagttaaatactgattatagccataaacaagagcaaattaaacaaaatacagatcgaaagcgtatcggtttaattaggcgtttgactgttttcggagtgttggccttaatcattggtggattgatggtatcagctttaattacgcaaacctcagctattgagaacaaaaaagctgagaaggtgaaattagaacagcagctgacaaaattacaaagcaagcaaaaacagttaaaaggtgaaatcgtcaagttaaatgacgatgattatattaaaaagattgcccgcagagattattttttatcagaagacggagaaattatctttaatgtaaaaaaagactaaacgtatggttcgttgacagtgtatttttgctttttgtataatataataaattgatttcttttatcatttaaggaggagcattttttttatgtcaatcgaagtaggcagcaagttacagggaaaggtaacaggtattacgaactttggagcttttgttgagttaccaggaggttcaacaggcttggttcatatcagtgaagtagctgataattacgtaaaggacattaacgaccatttaaaagtgggcgacgaagttgaagtcaaagtaattaacgttgagaaagatggtaaaattggtctttcaattaagaaagcggtagacaaaccagaacgtccagaaagaccagagcgtcctgcaagagcgccacgctcagaccgtccacgtgattcacgcccacaacgtaataacaatcgtggtggcggtaatgatttccgtacaaaagaaacattcgaacaaaaaatgaatcgtttcttaaaagacagtgaagaacgtttatcttccctaaaacgccataccgaatcaaaacgcggtggacgcggtgcaaaacgcggttaacttgctgcttatatcaaatagatagcgagtttttggaaagtgccttttatctaaaaggtgctttttttatatgtaaaaaagagtagaaaaaaagcatgtactgttgtacatgctttttgatgacccgtacgggattcgaacccgtgttaccgccgtgaaagggcggtgtcttaaccgcttgaccaacgggcctttattcgagtagcggcggaggggatcgaacccccgacctcacgggtatgaaccgtacgctctagccagctgagctacaccgccattatacgttctctaaaagacatttataataatataaaaaagaagggttattgtcaataacttttttgttatttttatagactattatttgcttttaaaaaagaatgatgatcataggctttctctgaggcaaacagtatctctgatattttttaaattgccatgtaagattgtacatctttttgtatagttttcaatataatactagaaaatagtcgaacgattataggtattttgctagtccgtttgacaaaatttcacctttcgtcgcgatataataatgaataagtataattagcgggtggtgggagaatgcaaaagacggaaagagattttgcaagtccaacaacagaggcggtatttaaccgaactagattagaaatgtcccgtgtgtttacaaaggcgggtatgaaaacggaaaaggtgttatttcaatggggattgttgctgctagtcgtaggttttttattaggacgagcgttaattttaatgaaaatcatgccatttgctttgccattctttgcagctgtaatggctataaagaaagaaaaagcaccattggcaagtttagccgtattggcaggggcatttagtgtttccattcaaaatggaggtaccgtatttgctacactatttgttttcttactaattcatcgatttagcggcatactgacaatggatccgttaaaaaagctgccgttcactgtatttagcgcgatgttacttacaaaactaactattttttatgtgtttaccaaggaattcaccatgtatgattttacatttgtggcagtagaagcagggttgagctttatcttaactatgattttcttacaaagcgtgcctttaatttcataccgaaagcgaaaacaatcattaaaaacagaagaagtgatttctctaattattttgttggcatctgttatgacggggacaatagggtggatgatttacgggctttcggctgaacatatattatctcgttacttagtattagtttttgcttttgtatctggccccacgataggagctacggtaggggtcgtaaccggtttaattttaagcttcgcgaatgtttctagtttgtacgaaatgagtttactcgccttttccggcttacttggaggacttttaaaagacggtaaaaagctaggggcagctcttgggctggttgttggttcattgctaatcggcctatatgctcaggctgatcaaggattgacgactaatttgtatgaatcactgacggctgttgtcctatttttattaaccccatcttttgttttgaaaaacttgagtaaactagtaccagggacatctgaaaacatgcttgaacaacagcagtacgtgcgtaagatccgagacgtaacagcgaatcgcgtagaacagttctcaaatgtttttcaagcactttccaaaagctttacgcaaaatgggttttatgatgaaaagccaagcgccgataaagaagttgattatttcttaagcagcgttaccgaaaggacatgccaattttgttttaaaaaagaacaatgttgggcacagcagtttgatacaacctatgaatatatgaaggaaattatgcttgaagttgataatggcactcttgaacaaaatccaagactaattcgagaaatggacaaacattgtgtgaaatcgaaaaaagtcatcgatgtgattgagcatgaacttacgtattttaaagcgaatcagcacttaaaagcccaaattcaagaaagtagaaggattgtagcagaacagcttcacggtgtttctgaagtcatggggaattttgcaaaagaaattaagcgagagcgcgaaaatttaaatgtacaagaagaacagattttagaagctcttcgtaactttgggatggaaatcaatcaaattgaaatttatagcttagaacctggaaatgtagatattgaaatgtgggtgccatattgtcacggaagaggagaatgcgagaagattattgcgccaatgcttacagatattttaggtgaaagtattgtagtaaagaacgaagaatgtgctaaatatcctcaaggctattgccacgtttcgtttggctgtacaaaagcgtacgttgttgatacaggcgtagcacatgctgctaaaggcggagggtttgtatccggtgacagctactccatgattgagctaaacgctggtaagtatgcactagctattagcgatggtatggggaatggagagcgtgcccactatgaaagcagcgaaacgcttcagctgttaaaacaaattttacaaacaggaatagaagagacaattgcaattaaatcgattaactctattttatcgctgcgtacaaacgatgagatcttttctacgttagatttagcgatgatcgacttacaagatgccaatgtaaacttcttgaaaatcggttctacgccaagcttcatcaaacgtggagataaggtgattaaaatacaggcaagcaatttgccaatgggcattattgaagaatttgaagtcgatgttgtgaatgaacaaatgaaggccgaagacttattaattatgatgagtgatggcgtatttgaaggaccaaaacacgttgagaactacgaaatgtggatgaagcgaaaaattggcgagcttcaaacaaacgatccacaagaaattgcagacttaattatggaagaagttattcgaacaaaatcaggtttaattgaagatgatatgacggtagttgtggcaaagcttcagcacaatactccgaaatggtcatcgattccttcttacgcttatcgtaaaaaagcacaatagttagatagaagtatattttatctcctcctcgtctatcatgttaatactgataatgaggaggggattttttttatgaaaaaaggtacattgaaacagatgttggtcattacggacggtggttcgaatacaggtgaagatccggtagcaatggcagcactagctaaagaacaagggattagtgtaaacgttattggtgtgatggaagaggacacaattgatgagcaaagtacgaatgaaatagaaggcattgccatgtcaggcggtggcgtgagtcaaattgtttacgtaaaacagctatctcaaactgttcaaatggttacaaggcaggcaatgacgcaaacacttcaaggtgttgtaaataaagaacttcagcaaattctaggttcctctaattcaagattagaagagttatctcctgagaagcgaggagaaatcatggaagttgttgatgaacttggggaaacggttgacttagagattcttattttagttgacatgagcggaagtatgaaaaataagcttcctactgtaaaggagtcgctgttagatttatcgttaagcttgaatgctcgcatggggcataatcaattttcaatctttttatttcctgggaaaaagaaagacgtagagaagctaatggactggaatccaaggttagagtcgctttcaacgatttttccgaaactaacagcaggaggtattacgcctactggaccggctatcaaagaggctactcattatttcaccaaaaagcgctcattgagagggttgttaaaaaataatgaacaatacattgaagaatcaggtatgtaacctatctccgggaacagaaattcaaggaaaatggcatcacgtccattataaaattcttgagaaattaggcgtgggggcaactggagttgtctatttagttcaattagtaaacggaacgctagcagcgttaaaaataagcttttccaacatgtccgttacagcagaagtgaatgtgttaaaaaagctctctcaagtcaaagacaaagtgctaggaccacgcttacttgatgtagatgattggagctacggttctcatgctctttctttttatgtaatggagtatgtgaaagggcagcctctcctttcctttatctcaacaagagggacagaatggctgcaagtatttgcaagtcagctcttaacagacttagaaaaccttcatgaagaaggatgggtatttggtgatttaaaaccagaaaacctggtcgtaacatctaaccccgtaaaagttcgatggattgacgtaggaggaacaactctgcaagggcggtcaataaaagaattcaccgacttttatgatcgagcgcactgggggcttggctcccgaaaagcagaaccaacctatgatttgtttgctgtatctatggttttgattcacgcagcttatggcaagcgaattaataaaacggacaaaccggctgaacaattaaaacaatttatattaacaacaaagcagttggaacctttcggggacgttttgtatcaagcggttacgggaaagtataagtcagctaaagaaatgaaaacagaggtgttatcggtcgaaaaaagaagaggggcaaaaagtaaaggaacaaagcctcaaaacgttcgtcaaccgtctgcccctcgtgttaaagtaaagaagaagcgttctcacgtgttagagacgctactactttgtacgtctgtaatgttgatttatattttgtatctatttattcaagtgctataaagtttggagaaattgtgaaactttccttatagtcattcgtataaagtaaattaatgatacattattgcgtgtacattataaggatgagtcattcttatggaaaagcaagtgaacaattttatgacaaaacatcagttattatccgcaggctctacagtggttgtaggtatttctggtggtcctgattctttagcactgctgcatttcttatggagtctgaaagagcaaaaatctctcacgattattgctgctcatgttgatcatatgttccggggcgaagagtcacagcaagatatggaatatgtgcagaactactgcaaacaattgaatattaaatgtgaggcgaagcagattgatgttactgcctatcagaaggaaagaaagttatcttctcaagtagcagccagggaatgccgctatacattttttactcatgttatgaagaagcacaaagcaaattttcttgcattaggacatcacggagatgatcagattgaaacgatgttaatgcgaatggtccgaggcagtacgatgaatggatacgcagggatgcagcccaagcggccatatgcggatggatttattattaggccgttcctagccgtaacgaaagaagaaatcaatcgctactgtaagctacatgggcttacccctcggattgatccgagtaatgagaaagactcgtacacgagaaatcggtttcgtcattacgttttgccatttttaaagcaagaaaacgcagctgtacatgaaaaatttcaacaatttagcgagaacttgcatgaagatcaagcatacttagaggaattaacgaccgatgtgatgaataaagtaatgagaaagaaattgcaaaatgaaattctcatcgatagagattgttttctaaggatacgcaagcctttacaaaggcgtggtattcaactaatattaaactatctctataaagaaattcctccaaccctttcctcagcgcatgttgacatgttagtaggattttgcgaaagtgaaaaaccgtctgggacgcttgactttccaaatggtttacgtattatccgatcttacaacgactgtcttttcacctttaatgaggggaacatcgagccatatgaatttattgttccgattccaggggtcgtcgagcttccaaatggtcaccagcttatttgtgaaatacataataaagtcgaagatataaaaggaaacgatgtttttcttttagatgaagctcacgatttacaatcattaaaggtaaggacacgaaaaaatggcgataaaatgcgagtaaagggcatgaagggacataaaaaagtaaaggatatttttatcgatgaaaaaatccctttacacttcagagatcattggccggtagtggaagatagccaaggaactattttgtggctacctggtttgaaaaaatctgcttatgaactgcatacacataagtccagatatgttattttatactataagtagcgaaaacttctaggaggcaagtaaggaatgaagcaggatattcaagaaattttgatttcagaagaagaaatacaacagaaagtaaaagaattgggtaagctattatctgaggaatacgctgaccgttttcctttggtaatcggtgtattaaaaggcgctatgccttttatgtctgatctaattaagcgtgttgatacatatttagaaatggattttatggatgtatcaagttatggcaatgcaatggtttcttctggtgaagtaaaaatcctaaaagatttagatacatcagttgaaggtcgagatattcttatcttagaggatattatcgacagcggcttaacgcttagctatcttgtagagttattcaagtaccgtaaagctaagtcaattaagattgtcacactcttagacaaaccaacaggtcgtaaagcatctattaaagcagattacgttggatttgaagtacctgatgcattcgtagtagggtatggattagattatcaagaaaaatatcgtaacctgccgtatattggggttcttaaaccgcaagtatacagcaattaataagcacatatccaagtgcaatttattggataggataaatgttctatgttagtattgaatacagtatttgtttatcgtgggaggaggtaagaaatgaatcggatcttccgtaataccatcttttatttacttatatttttagtcattattggcgtggtaagcttctttagtggctctaatcaaaaagcagaaccaatgagatacgatacatttgttcaacacttagacaaaggtgatgtgaaatcactctctatgaagcctgaaagaggcgtgtatgttgtgcaagggaagttagattcttataaaaaggatcaaacgttccaaacttacatcgtagatggtgacaaagcacttgatcggattgacgctgcttcagaaaataatcaagtagaagttgattttaaacctgctgatgaaacaagcggctgggtaacgttctttacgtcaatcattccgtttgttattattttcatcctattcttcttcttactgaaccaagctcaaggtggcggaagccgcgttatgaacttcggtaaaagtaaggctaagctttacagcgaagaaaagaagaaggttaaatttaaagacgtagctggtgcagacgaagaaaaacaagaacttgtggaagttgttgagttcttaaaagatcctcgtaaattcgcagagctaggtgcaagaattccgaagggtgtcttacttgtgggacctcctggtactggtaaaacattattagcaagagctgttgctggtgaagcaggcgttcctttcttctctatcagtggttcagactttgttgaaatgtttgttggggtgggtgcttctcgtgttcgtgatttattcgaaaatgcgaagaagaatgctccatgtattatctttattgatgaaatcgatgctgtaggtcgtcaacgtggcgcaggtcttggtggcggacacgatgagcgtgaacaaacattgaaccaattgcttgttgagatggatggttttggtgctaacgaaggtatcattatcattgcagcaacaaaccgcccggatatcttagatccagcgttattacgtccaggccgcttcgaccgtcaaattacggtagatcgtccagatgtaaatggccgtgaagcagtgcttaaagtacatgctcgcaataagcctttagatgaatcagtaaacttaaaagcaattgctatgcgtacgccaggtttctcaggtgcagatctcgaaaacttgttaaacgaagctgccttagtagctgctagacaggacaaaaagaaaattgaaatggttgacattgacgaagcaacagaccgcgtaattgcaggtccagctaagaaaagtcgagttatttctaaaaaagaacgcaatattgttgcttatcatgaagcaggacatacaattatcggtgtcgtattagacgaagctgatatggtacataaagtaaccattgttccacgtgggcaagctggtggatatgctgttatgttaccaaaagaagatcgctactttatgacgaagccagagctgctggataaaattgttggattgcttggtggtcgcgtagctgaggaaattattttcggcgaagtgagtacaggtgctcataatgacttccagcgtgcaacaagcatcgctcgtaaaatggtaacagaatacggtatgagtgaaaagttaggaccaatgcaattcggtcaatcacaacaaggccaagtattcttaggtcgtgatttacacagtgaacaaaactacagtgatgcgattgctcatgaaattgataatgaaatccaacgtttcattaaagaaagctatgagcgtgcgaagcagatcttaacggaaaaccgtgacaagttagagcttgtagctcaaacattgttagaagtagaaacgttagacgctgagcaaatcaaccacttagtagatcatggaactcttccagaccgttctagtcacgtaacagatgaagatgttaaagtaaacatccaaacaaagacagacgatgaagagccaaaagcataagacaataaagatcagtggagatattctccactgattttttaatgggcaaaagttaggtttggtaaaagattttcgtatatatggtggataagtaggatatccactagagaatcgtgtcattatattcctattttatctagaatatacacgtctatttaccagttatggtatgatggtttcagtgtgaatactgaatttatataaagtggtgattgaaatgatttttgtattagatgttggaaatacgaatacggtattaggtgtatacgatggagatgaattgaagtatcactggcgtgtagaaacaagccgtaataaaacagaagacgagtatggcatgacaattaaagccttgcttgagcacgttagtttatcttttaaagatattcatggtattattatttcctctgttgttcctcctattatgtttgcattggagagaatgtgtcaaaagtattttcatttaaagccgcttgttgttggtcctggaattaagacgggtttaaatattaaatatgaaaatccgcgtgaagtgggagcagaccgtattgtaaatgctgttgctggaattcagctatacggaagccctttaattatcgttgattttggtaccgcaaccacatattgctatattgatgaaaataagcaatatatgggtggcgcgattgcccctggtattaatatttcgacagaagctctttattcaagagcatctaagcttccgcgaattgaaattgcgcgaccaaatagcattgtgggaaaaaatacagtatctgcgatgcaagcaggtattttatatggatacgttggacaagtagaaggaattgtagcaagaatgaaagagcaagcaacagtaaatcctaaagttattgctactggaggactcgcaacattgattgctaaagagtcggatattattgatattgtggatccatttttgactttaaaaggattgcaaataatttatacaaaaaatatggagtaagaggtgtatattatgggtgactatttagtaaaagcattagcttacaatagtcaagttcgcgcttatgcagtaaaaacaacggatacagttggagaagcgcagcgccgtcactatacatggcctacagcctctgcagcattggggcgttcaatgactgcgggagtcatgatgggggctatgctaaagggtgagcaaaagctaacaattaaaattgaaggccgcggcccaattggcgttattttagtagacagcaatgctaaaggggaagtgcgtggatatgtaacgaatccacaaacgcacttcgatttaaatcagcatgggaaattagatgtagcacgtgctgtaggtacagatggcacgctaagtgtcgtaaaagatatcggaatgcgtgatcaatttaacggacaagtacctattgtatcgggagaattaggagaggatttcacgtattattttgtgacatctgaacaagtcccatcttcagtaggtgtaggtgtacttgttaaccctgataacacgatcttagctgcgggcggatttatcattcagcttctgccgggaacagatgataaaacgattacagctattgaacaacgattacagacgattgaaccaatttcaaagctgattcaaaaaggtctttctcctgaggaaatcttagaagaagttcttggaaaagaaaatgtgaagtttctggagacaatgcctgtagagttcaaatgtcagtgctcagaagaaagaattgccaatgctattatcagtttaggacaagaagagattcaatcgatgattgaggaagacggccaagctgaagcccagtgtcatttctgtaatgagacctatcgttttgataaaaagcagcttgaagaaatgaaagagcaagcaatttaaatgaaataaaagattcttaaaaggcgtcattttataaatgagcgcctttttttatagatattaagttctatttctgtatatattgatctaaaaatataacaaaattaggtaaatggaaagacaaaatgattgacaatttagaaaacatctgataaattgtatacaaaatcaataaaattagttggtattaggagtggtcatatggcacgtattgcaaattcaattacagagttaattggtcaaacaccaatcgtaaaactaaaccgtctagttgaagaagatatggcggatgtatatttaaaattagaatttatgaacccgggaagcagcgtaaaagatcgtatcgcattagcgatgattgaagacgcggaagcaaaaggtgtgttaaaacctggcgacacaatcattgaaccaacaagtggtaacacaggaattggcttagcaatggtagctgcagcaaaaggataccgtgctattttaacaatgcctgaaacgatgagtattgagcgtcgtaatctgcttcgtgcatacggtgcagagttagtgttaacaccaggtccagaaggaatgaaaggggcggttaataaagcaactgagcttgcaaaagagcacggctactttattcctcagcagttccaaaacgaggcgaacccagaagtgcaccgtcaaacaacggctaaagaaattatcgagcagtttggcgatcagctagatggatttgtggcaggtatcggtactggcgggactattacaggtgctggtgaagtgttaaaagaaaagtacccaaatatcaaaatttatgcggtagagccagctgattctccgattttaagcggtggtcaaccagggcctcataaaattcaaggaattggtgcaaactttattccggatacgcttaacacggaagtatatgacgaagttgtcgctgttcaaaacgatcaagcttttgaatatgcccgtaaagtagcaaaaacagaaggtgtactagtaggtatctcttctggggctgcgatttatgctgcgttaaaagctgcaaaacagcttggaaaaggtaaaaaagtgttagcgattattccaagtaatggtgagcgttacctaagtactccattgttccaattcgaggaacaaacacaagcataaaaacgataaaaaaacagcttctacatgaagctgttttttttcatctaagaatcatgtaaaatgaaagcaggtgatttatttttaggagagtgaacaaatgcagcaaagaatgacttggggcgaatctatttctatctctaaaaaccaatggttcaaaaaatatcaagagttgtcaaaagaggaatcgaatcatatcctgcttgaaagcggtcgaggcggaaagtttcaaatgatgggattaaaacctgtagccattttgcgaggcgaacaaaacgagcttcatatcaaaacggatgaccaaactactgttcaaaaaggtaatccgcttcatcttatgcgagactggatgaagaagtttgaaacagaggtgaatccagatcttcctccttttcaaggtggagcaattggctttattagctatgattatatccgctatgtagaaaccatacctgaccttgctgaagattcattgaaaacgccggacgtttattttcttattttcgatgacgtatttgtatacgatcaagaaaaggaaaagctctggattatcgttaatgacgaagcagattgtaaagagcaggcacataagcgtattgatcaatacaaaaaggactggatggaggcaagtgatgaaggactctcatatgagcggattcatcgtgttgccgaaaagagtgaggtttcgatgtctgaagctgctttttcagatgccacaactcgcgtacatgagtatatcgggcaaggcgatgtgtttcaagtgaacttatctgttcgacagtctcaacagcttcaaactcatcctatgcatatctacgaacaggtacgaaaaattaacccgtctccttacatgtcttatatgcagacagaagaatttcacattgtgagctgttcaccagaactattagtgaaaaaagccggtgatgaaatcagtacgagaccgattgcgggaacacgctcccgcggtaagggtgatcaagaagaccaacagttagcggatgagcttattcataacgaaaaagagcgtgcagagcatgtgatgcttgttgacttggagcgtaatgatcttggtagagtaagcgaatatggtactgtgcatgttgacgagtttatggttattgaaaaatattcacatgtgatgcatattgtgtctaatgtaaaaggcaagctcgcgcacaacaaagattttgtagatatcgtagatgcggtttttcctggaggaacgattactggagcacctaaagttcgtacaatggaaatcattgaagaacttgaaccagttcgacgaggaatttatacaggatcgattggttggattggatttaatggagatatggaattaaatattgcgattcgcactatgattattcaagacggccaagcttatgtgcaggctggagcgggtgttgtgattgattcaaatccgaaacacgaatacaaagaatcactgaaaaaagcaattgcactatggaaagcaaaagagcagagcgaaaatgagctgagtgagggtgagtaaagatgatattaatgattgataattatgattcttttacgtttaatttagtacagtatttaggtgagctagggcatgagcttcttgtaaaaagaaatgatgaaattacactttctgaaattgaagtgctaaatccagatttcttgatgatctccccgggaccatgcagtcctaacgaagcgggaatcagtctagaagccatcgagtattttgcaggtaagattccaatattcggcgtatgcttagggcatcagtcaattgggcaagcttttggagggaatgtgattcgtgcggataaattaatgcacggtaaaacatctgaaatgcatcatgatggccgtactatctttaaaggtcttgataatccgttcacggcaacgcgatatcattctttgattgtagaaaaaagttcactgccggattgctttgaaatttcagcgtggacagcagaagatgaaattatggcgattcgccataaatcattacctattgaaggagtacagttccatcctgaatctatcatgacttcttacggtaaagaaatgctgaagaattttattgaaacttacgaaaaaaagcgagtgtaatgatatgtatatatacgtaaatggcgaagtaaagcctgcgtctgaagccactatttctccgtttgatcacggatatatgtatggcctagggctgtttgaaacgttacgagtttatgaaggtcatccatttttagtggaagaccatctggatcgactgcatagcagcttacgtgaattaaatattgtatgggactactctacacaggacgtgttgggaatcattaatagtctgttaatgaacaacaatgagagaaatgcgtatgttcgattaaatgtctcagcaggaaatggcggaattggcttgcaagtggaagaatacgacaagccatctacaatcgtatatatgaaatcaatgcctcatccatcgagcccccttgtaaaagaggggcttattcttgagacgaaacgaaatacgcctgaaggaaccatgaggttaaagtctcatcattatttaaataatgtactagctaagcgagaagttggttcagacttaaataaagagggtatctttttaacaaaagaagggttcttagccgaaggtattgtgtccaatttattttttgtaaaaggtgattgcgtatatacgccgtctcttgaaacaggtatcttaaatggaattacgagacagtttatttttacgcttttaaaaaagaaaaacatagaagttgtagaaggcttatttacagtggaacacctcttggagggggatgaagctttcgttacaaattctattcaagaaatcgtacctcttcgaagtataaaggataagcagttttcagtaggagaccatacgctgatagctcagttgcaaaaagagtatcgctcttacacgatgtcgctaatgagtcgacacgagctacatgtataaaagcgaaaggagagactaaagatggataaaatttatgtgaatgatatgcgtttctatggttatcatggcgtatttccagaagaaaataaattagggcagcgttttcatgtggatttagctgtggaactggatttaaagcaagctggtactacggacaatttagaatactcggtgagctatgcagatttataccaaacatgccaggaagttgtagagaagcgcacgttcaagttagttgaaacggtggctgaaacgattgcatctgaattgctttctaattacgaactcgtgcaggcttgtacagtaaaggtatataagccggatccgccaattcccggttattatcaatcggtagctattgaaattaaaaggagccgttgaatgacaacagaagtatatattgcattaggatcaaatattgaaaatcgaatggaacatttgaagtcaggagttactggcttgatgaaacactctgagattaaggtagtggctgtttcatctgtttatgaaacggccccggtcgggtatacgaatcaagcaagctttttaaacatggtagtaaaaatacaaacaacgtattcgtcagagcaccttttagattgtttgcaagccattgaacaaacggcaggccgaaaaagagagattgtatggggacctagaacccttgatttagatatcttactttatagtaatgaaatcattcatacggatagactgagcgtccctcatccccgaatgtttgaacgagcgtttgtgatggttcctctaaacgaactagctccatctcttattctccctgtagcagaagaaaaagttgaaatcatcacaacacgtttatcagatttaaaagatgtaaaattatttcgagagcaaacaacgggtatactagatatgttcgaaaataatcgtaatgatttacataagtgaaaatgaatcttattagttgattcatttttatattggcgtaaagtagagttcatagtgaaaactttgaggtttgggttcgcaggttgttggtttattcggtagcttgttagagaaatcgaagaaaaagagaagcgaagcaagaataaagcgatttgacatagagaaacgactgaacctataataattttaaagaaacgtagtagttgccagtaaacatgctggccttttttctgtttcggaaaacttaattatacgatggagatgagtaaacgatgagtcatgaagaattaaatgatcaatttctcgttcgtcgcgaaaaaatgagcaacctacgagatcaaggtattgatccgtttggtcaacgttttgaacgtacacatacatcacagcaattaattagtgagtatgacgagttaacaaaagaacagttagaagaaaatgaagtacctgtgtcactagctggtcgtattatgacaaagcgtggaaaaggaaaagcaggtttcgctcacgttcaagatttaacaggacaaattcagctttatgtacgtaaagatgcaattggcgaagaacagtacgaaatcttcagcagcgtagatatcggtgacttggtaggggttgaaggtgttttattcaaaacaaaagttggcgaactttctattaaagtaaaagattttacgttactaacaaaagcgcttcgtccacttccagataaatatcatggtttaaaagatattgaacagcgctaccgtcaacgttacttagatttaattacaaatccagaaagtaaacaaacattcatctcaagaagccgtattattcaatcgatgcgccgttacttagataatcatggatatttagaagttgaaacaccgatgatgcattcaatcgcaggtggagcagcagctcgtccgtttgtgacacaccacaacgcgcttgatatggaactttatatgcgtattgcgattgaacttcatttaaaacgtttaatcgtaggtggattagaaaaagtatatgaaattggccgtgtattccgtaatgaaggtgtatctacacgtcacaatcctgaatttacaatgatcgaattgtacgaagcgtatgcggactacaaagacatcatggctttaacagagaacttaattgcacacattgcgcaagaagtacttggcacaacaaagattcagtatggccatcaagaggtggatttaactccagagtggacaagacttcatatggtcgatgctattaaacaatatacgggcgtagacttctggggagaaacatctgttgaagaagctcgtgctttagcaaaagaacacggggtagaaatcactgaacatatgcaatatggacatattgtaaacgaattctttgaacaaaaagtagaagagcagttaattcaaccaacgttcatttacggacatcctgtagaaatctctccattggctaagaaaaatgcggaagatccgcgttttactgaccgttttgagctgtttatcgttgcgcgtgaacacgcgaacgcatttacagagctaaatgatccaattgaccaacgtgagcgctttgaagctcagttgaaagagaaagaacaaggaaacgatgaagcacatgagatggatgatgacttcattgaggcattagaatatggtatgccacctacaggtggtctaggaatcggtattgaccgccttgttatgttactaacaaatgcaccgtcaatccgtgatgtactattattcccacatatgcgtcaacgctaaaaaagagatggctacggccatctttttttagttaataatattagaaaatttaaacttttaattcacctcttgtttttatgaaattgatttggtatatttatatctgttgctaacgcagacaagcgaaaacaacaaaaagaaataaaaaagttattgacattacgttaataacttgataagatagtaaagtcgcttaagagcggcggttgaactttgaaaactgaacaaagcgacaaacgtcaacgttaatttttattttttaaattgagcaagtcaaacatttcttcggagagtttgatcctggctcaggatgaacgctggcggcgtgcctaatacatgcaagtcgagcgaactgattagaagcttgcttctatgacgttagcggcggacccgaagtcggtggagtaaccgtaaggagctagccgcctaaggtgggacagatgattggggtgaagtcgtaacaaggtagccgtatcggaaggtgcggctggatcacctcctttctaaggatttttacatgacgtacgttttgacactttgttcagttttgagagttcaatctctcattaataattgcgcctgcgattactcggcgcaaaactgcacgtagatatcacagtgatgtttatcatgatgtgattgaagtcagttgttttgttctttgaaaactagataacagtaattgctgaggaaaagtgaaacttttctttaatcaaaccaataaataacacaacagtatgttgtaccatttattcgctaatggttaagttagaaagggcgcacggtgaatgccttggcactaggagccgatgaaggacgggactaacaccgatatgcttcggggagctgtaagtgagctttgaagatatcacagtgatgtttatcatgatgtgattgaagtcagttgttttgttctttgaaaactagataacagtaattgctgaggaaaagtgaaacttttctttaatcaaaccaataaataacacaacagtatgttgtaccatttattcgctaatggttaagttagaaagggcgcnnnnnnnnnnnnnnnnnnnnnnnnnnnnnnnnnnnnnnnnnnnnnnnnnnnnnnnnnnnnnnnnnnnnnnnnnnnnnnnnnnnnnnnnnnnnnnnnnnnncaagatgagatttcccatagcgcaagctagtaagatccctgaaagatgatcaggttgataggtcagaggtggaagcgtggcgacatgtgtagctgactgatactaatcgatcgaggacttaaccaaacttttaaaagcgtaagctttactcagcaaactgttacctagttttgagagagcaatctcttgtctggtggcgatagcgaagaggtcacacccgttcccataccgaacacggaagttaagctctttagcgccaatggtagttgggactttgtccctgtgagagtaggacgttgccaggcacctgaaaaaggactagctattttagctagtccttttttgtttacaatttatttgttttatgaaaaagtatagtaaggacaataaaattcacgatttgcaggttttgaaataaattttagtggcaacgataaaagtaaagaataaactttaatagtacatagttgaaaattttttcgtttccttttatatttaaattaaggtcaaatatagtcaaagtcagaaggagggggcagtgtgccaaatatctctgacattatcgaacagtatttaaaacaagtacttgaattaagtgaaagagaaattgttgaaataaggcgcagtgagattgctgataaatttcaatgcgttccgtcgcaaattaattacgttatcaatacccgttttacagttgagagaggttatcttgtagaaagtaagcgaggcggcggcggttttattcgtattgcaaaagtaaaaatgcatgatgcagcggatttgtttcagcaagtaattgagatgattcaaaatgaaatttcacaagtaagtgctgaaaacgtcattattaggttagttgaagaaaaagtcatcacagaacgagaagcaaaaatcatgttgagtgttatcaatcgttcagttattaatattgaacttccttatcgtgatgagctaagggctaatcttttaaaagcaatgcttaattcattacgctaccgataagctcatgatctattttatttagaacagggagtgatgacaggatgatttgtcagcaatgtgaaacgagacctgcaactcttcacttcacaaaaatcattaatggtgaaaagacggagatgcatgtatgtgaacaatgcgcttcagaaaatggagatgcattttctttttcaaatcagcaaggtttttcaatcaataacttactagctggcctacttaacctagatccagcagtaactgaaaattataagcaacaaagtcaggagattctttcttgtcctacttgtggcatgacatatcaaaaatttgctaaaatcggcaggtttggatgtgcagattgctacaaaacattcgagcgacctcttattcctttcttgaagaggctgcatggaggtaattatctgcatcatggaaaaataccagcaagaattgcaagtaatcttcatttaaaaaaggaattacaggcattaagattgaacttaaaagagtatatcgaaaaagaggagtttgagaaagcagccgaactccgagatcacattcggttactagaaaagaagatgaacgaatcgagagaggaggaagcgtaattcatgtcccaggatttgttcttttcccagcctgttagctcttggatgcgtcaagaagcttcgaattcagatattgttctaagcagtcgaatcaggctggctcgaaatttaactcattatctttttccaactctcttttctaaagaacaagcagttgaagtggttcgagtattcgagcaagtttttcaaaaaagtgaaaacaccaatcagtggaatttgcatttactaaagatgaacgaattacaacctcttcaaaagcaagtgttggttgaaaagcatcttatcagtcctaacttggctgaaggagataacaacggagcttgttttttatcagaaaaagaagatttgagtattatggttaatgaagaagatcatttacgcatacaatgtttatttccaggtcttcaattatctgaagctttaagcacagcgaataaagtagataattggattgagaaatacgtagattatgcgtttgatgaaaatagagggtatttaaccagctgtcccacaaatgtgggtactgggctacgtgcatctgtgatgatgcatctgccggctttagtgatgacccgtcaaattcatcgtattattcccgctattaaccagcttggcttagtggtgagaggaatttatggagaaggtagcgaagccttagggaatatctttcaaatttctaatcagataaccttagggaaatctgaagaagatattgtggcagatttaaatagtgtcgtacagcagttgattacacaagagcactctgcaagagacgcgctgtttaaaacatctcatgtagagttagaagatcgagtgtatcgttcatatggagtattggccaatagccgtattattgagtcaaaagaagcttcacaatgtttatcagatgttcgattaggaatcgatttagggtatataaaaggactgagtcaaaatatattgaatgaacttatcattatgacgcagccaggctttttacaaaagtattcgggaggtcctctaaagcctcaagaacgtgacattaaaagagccaccttaattcgagaacgtctcactataaataaaaacacaaattaaacgtggagggtgacgattatatgatgtttggtagatttacagagcgcgcacaaaaagtattagctttagcacaggaagaagcactacgcctaggtcacaacaacattggaacggagcatattttattaggtatcgttcgtgaaggtgaaggaattgcagcaaaagctctttctgctctaggcctaagcactgaaaaaattcaaaaagaagtggaagcattaattggcagaggccaagaattaacgcagaccattcattatacacctcgagcgaaaaaagtcattgaactttcaatggatgaagcccgaaagcttggtcattcttatgtaggaacagaacatatcttactaggcttaattcgtgaaggtgaaggcgttgcagcacgcgttttaaataatttaggtgtcagcctaaataaagctcgtcagcaagtgcttcatttattaggtagtaatgaagctgcttcaagtcatcaaggcggaggctcttcaaacgctaatacacctacgctagacagcttagcacgcgatttaacagttgtagcgcgcgaaggaagcttagaccctgttatcggacgtgggaaagaaattcagcgtgttattgaagtgttaagccgacgtacaaaaaacaatcctgtattaattggggagccaggtgtcggtaaaacggcaatcgctgaaggtttggctcagcaaatcgtcaacaatgaagttccagaaattttacgtgacaaacgcgttatgactttggatatgggaacggtcgttgctggtacaaaataccgcggagaatttgaagatcgcttgaagaaagtaatggatgaaattcgtcaagcaggtaatatcattctctttatcgatgagttacacacattaattggcgctggtggcgcagaaggtgctatcgatgcttctaatattttaaaaccgtctcttgctcgtggagaacttcagtgtatcggtgctacgactttagatgaatacagaaagtacattgaaaaagatgcagcgttagagcgtcgcttccagccaattcaagtggatgaaccaacgttggaagagtctgttcaaatcttaaaagggcttcgtgaccgttatgaagcgcatcaccgagtatctatttctgatgaggcaatcgagcaagcggtgaaactatcagatcgctacatttccgatcgtttcttaccggataaagcaatcgatttaattgatgaagctggttcaaaagtgcgtttacgttcatttacaacgccgccaaatttaaaggaattagagcaaaaattagaatcagtacgcaatgaaaaagatgcgtctgttcaaagtcaagaatttgaaaaagcagcatctttacgagatacagagcaacgcctacgcgaagaattagaagacacaaagaaaatttggaaagagcagcaaggtaaagaaaactcagctgtaaccgtagaagatattgcgatggtggtatctagctggacgggtgtaccggtctctaaactggcacaggaagagacagaaagactgctgaacatggaagagattcttcactctcgtgtaattgggcaagaagaagcggtaaaagcagtggcaaaagctgtgcgccgtgctagagcaggcttgaaagatccaaaacgtccaattggttcattcattttcttaggaccaacaggggttggtaaaacagagcttgcacgtgcattagcggagtcaatcttcggggatgaagatgcaatgattcgtatcgatatgtctgagtacatggagaaacattctacttcccgattagtaggttcacctccaggatatgttggatacgaagaaggcggccagttaacggaaaaagtaagaagaaaaccttactcagttgttcttttagacgaaattgaaaaagcgcatccggatgtatttaacattttattacaagtgttagaagatggacgcttaacagattcaaaaggccgtacagttgatttccgtaatacgattttaattatgacatcaaacgtaggtgctgatacattaaaacgaagcaagcacttagggttcacagtagaagcagaagggcaagactacaaagatatgaaaggaaaagtaatggcggaaatgaagcgcgctttccgtccggagttcctaaaccgtatcgatgaaattatcgtcttccattcattagagaaacctcacttagctgaaatcgttaaattaatggcggatcagttaacaaaacgcttaaaagagcaagaaattgatcttgagttaacaaaagaggcaattgataagattgcagaggaaggttttgatccagaatacggtgctcgtccacttcgtagagcaattcaaaaacatattgaagaccgtttatctgaagagctgctaaaaggagttgttcaaaaaggtcagaaagtgacgctagatgtagacaaaggagaatttgttgttaaatcctccgctccaagcagcatcagctaaatttactcaaaccaagacgaggcatacgaaaaaacacgtatgcctccctttttattttagcttaggaaatagtgtacaatagagatagaaatcgattgaatgaacggagagattgataacataatggcgaaacgaaaaacaaaatttgcatgtcagcattgcggatatgaatcagcaaaatggatggggaaatgtcctggatgcggaagctggaattctatggtagaagaaatggaagaaacgaaatcatcacgccgaggagctttttccggagctactgcttctaaagttcaaaaacctcagtcaattacagcgattgaatctacaacagaaccacgaatttttacaccttctgcagagttaaatcgtgtattaggtggaggtattgtccgaggctcactcgttttaatagggggagatccgggtatcggaaagtctactttacttttgcaaacctctgcgcagttagcaatgaaacaaaataaagtactatatatttcgggagaggaatcaaccaagcaaacgaagttaagagcggacaggttaggtgtaaaagctgaagagctttatgttcacgcagaaacaaacttagaattaatactagaggccatctcaagcatgcagcctgattttgtggtgattgattcaattcaaaccatttaccatgctgatgtcacatcagcgccaggaagcgtctcacaggtgcgagagtgtacggctgaactaatgcgtgttgctaaaacgaatggaattgccatctttattgtggggcatgtaacgaaagaaggggccattgcaggtccaagacttcttgaacatatggtggatacggttctttattttgaaggagagcgtcatcatacgtatcgtatattaagagcggttaagaaccggtttgggtctacaaatgaaatgggcatttttgaaatgaaagaaagtgggctagaagaagtattgaatccgtctgaaatctttctagaagaacggtctcagggagcagcagggtcggttgttgtcgcttcaatggaggggacaagacccgtattagtagagctgcaggcgctaatcagtccaacgagctttggaaaccctagaagaatggcgacgggagtagatcataatcgcgtttcgcttatcatggctgttttagaaaagcgtgtaggaatgctgctgcagaatcaagatgcttatttaaaagtagcaggtggagtgaaattagatgaaccagcaattgatttagctgtagccgttagcattgcttcaagtttcagagatgctgcttctagcgctacagatgttattgtaggagaggtaggattaacaggtgaagtacgccgagtatctagaattgaacagcgcgttcaagaagcggtaaaattagggttccaacgaattattatcccagagaaaaatttaggaggatggaaagtcccagatggtattgatgtgattggggtatcaacagtagcggaggctctgcaatatacattaggaggataagcagtggaaggagaaaaaacaacagttagtcaaaaacaaatatcagaaattctgcagtttgtagcaccaggaacccctattcgtgacggtatcgataacgtcttgcgggcaaagacgggcggcttaattgttatgggctacaatgaacaagtcaaaaagatggtagatggaggattttcgattaattgtgcatttacacctgcgcatttatacgagttagccaaaatggatggagcgcttattttaaacgacagtggaagcaagatattatttgctaatgctcagctcatgccagacccctctactccttcttcacagacaggaatgcgacaccgtacagcagagcgcgtagctaagcagtcaggtgtattggtgatagccatttcacaaagaagaaatgtgattacgctttacaaagggtctctgcagtatgtattgaaagacattagcgttattttagcaaaagcgaatcaagcgcttggaacacttgagaagtacaaggcggtattagacgaatcgattacaagtctcagtgcattagagtttgaagagcaagtaactcatacagacgtgctgcagtcgcttcatcgtacagaaatggttctgcgtattaaaaatgaaattttgagctatattagcgagttaggaacagaaggaagactaatccgtctccaaatgaatgaactactttcccacttagaggaagaagcaactttattaatcaaagattatatgtatgacctcagctttgacccttaccgagtaattgaacgcatgcagcagccatcaaataatgttcttctcgatgaccagacgcttcttcgcttaatgggatatcccatgtatacaagctttgaagacagcgttattcctagagggtatcgaatgcttcataaaattccaagacttccatcgattattattgaaaatctcattgatgaattaggggatttaaaaacgatagcagatgcgtcggtagaagaattggatgaggtagaaggcatcggtgaaattcgagcacggaaaatcagagaaggcctaaaaagactaaaagagcagcatcttacaaaccgtcagctataggatattaattgacattaaatgtttgattcattaagatattgtgaaaatacaaaaaaagtgacagtttgtttacaaattctgttttttggttaaataacaggtttcaatcattgtaaactgtttataatgataaaaggaggtgaaggcgtgttaaaacgttttgtacagttattttttattattacaggtggtacattgggcgtcttttttatacctgaacttattcaattattaaatctgcaagatgtagcatttctagaaaagccttacgtcgatgcaatactgggagccattttgtttttccttgtcacgttttggattgttgattatatagttgaattaattcgccgagtggaagaggcgttactgaaggcgcctgtaacggatgtgctttttgggagcttaggattgattttagggcttattgtagcctacttggtcggagcttttttaggcagaattcaacttcaagtagtaagtaccattttaccaatctttctaagtattcttttaggttacttagggtttcaagtcggatttaaaaaacgtgatgaacttgtaagcgtgttttcgatgccagctcgaattgggaagaaaaaaggacaagaagaagaaacagataacgaagaatcattaaagtctcttaagattttagatacaagcgttattattgacggccgtatcgcagatatttgtcaaacaggatttttagacggaacgattgttattccgcgctttgtgcttgaggaacttcagcatattgctgattcgtcggatgttctaaaacgaaacagaggtagacgaggtctagatattctaaaccgtattcaaaaagaactggcaatgaaggtagaaatttatgaaggcgatttcgaggacattcaagaagtagacagcaagctggttaaactagcaaagctgacttccggtttggtcgtgacaaacgattttaatttaaataaagtatgtgaacttcaaaatgttggcgttttaaatatcaatgacttagcaaatgccgtcaagccaattgtacttccaggagaagaaatgaacgtattggttataaaagacggtaaagagcacaatcaaggtattgcctatcttgatgacggtacaatgatcgtggtagaagaaggaagaaattatattggaaagcaaattgatgtactggtgacgagcgtactccaaacctcagcaggccgtatgatttttgcgaaacctaagttattagaaaaagcactgtgacgtaacaggtaaagggagtatacctatgaagtatgaaattatcgtgttagctgcaggtcaggggaagcgaatgaaagcggggcggaacaaacaatttttaactattcaaaacgttccgcttatcattcatacgctgcaaaaattcgaacaagatccttggtgcagtggaattgcactagtcgtaaacgaaaaagaagtagagatttttgaagagttattaatcgaatatccaattcaaaaggttcaatcattgacagttggaggcgatgaacgtcaacatagcgtttataacggtcttaaaagtttaaagcaggctcagatggtattaattcatgatggcgctcgtccatttgttcaacaaaacacaatccatgagttagtagaaaaagctgctagtgataaggctgctgtgctggctgttccagtaaaagacacaattaagcgtgtggaacagggtactgtcattgaaacagttgagcgctctagcttgtgggctattcaaacgccgcaggcttttctttttgatgtagtaatggatgcacacgaaaaagcaaaaacaaatgaatacttaggcaccgatgatgcaagcttagtagaaaaagcggggcaaaaagtatcgattgtagaggggaattacgataatataaaactaacaacaccagaagatttgttatatgcagaagctatattaacaaagctaaacaggactgaaggagtggaaaaatgaacattcgagtaggacaaggtttcgacgtacatgaatttgcagaaggaagacctttaatcatcggcggtttagaaattccgtatgaaaaaggattattaggccattcagatgcagatgtgctgttacatacaatcgcagatgccttattaggagcggcggctaaaggagatatcggaaagcattttccagatacagaccctgaatttaaagatgctgattcagcaaagcttcttcaacatgtatggaaactactaaaagatgaaggttatgaattaagcaatgtagattgcacgattattgcgcaaaaacctaaaatggctccttacattgaaccaatgagagagcgtattgcgcagctgttagaagcaagcatttctcaaattaacgtcaaggcaacaacaacagaaaagttaggcttcacgggacgtgaagaaggaattgccgcccaagcagccgttttagtttatcaaaaataaaaacagttgactttgacagatacctatttggtgataaaattagaacatgtctaaaacatataaatacatactataagtaatattaaattggaggtcatcttagttatgtcaagcgaagtaagagttcgttatgccccgagtccaactggacatcttcatatagggaatgcaagaacagcactatttaattatttatttgcacgaaatcaaaacggtaaatttattatccgtattgaagatacagatcaaaagcgtaatatcgaaggcggagaagaaagtcagctgcgctatttaaaatggttaggtattgaatgggatgagagtatcgacgtaggcggcgagtacggtccttaccgccagtctgaacgtacggaaatctatcaaaaatatacggaagaacttcttgaaaaaggattagcttatcactgttactgtacgtcagaagagcttgaaaaagagcgtgaagaacagcaggcgaacagtcaaatgccgcgctattcaggtaagtgccgtaacttaacagctaaacagcgtgctgaactagaaggagaaggccgcgagccaagcattcgcttccgtgttcctagtaacacagaaattaaatggaatgatattgtcaaagatgaagtatcatttgagtctgaaggcattggtgacttcgttattgtgaaaaaagacggtacacccacatataattacgctgtagccattgatgattatctaatgaagatgacacatgttctacgcggagatgaccatatctctaatacaccgaagcaaattcttgtgtatgaagctttaggctggacgcctcctgtatttggtcatatgacattaatcgtaaatgaaaatcgccgtaagctaagtaaacgtgatgagtcaatcattcagtttattgagcaatataaagaattaggttacttgccggaagcactgtttaattttattacaatgcttggttggtcacctgtgggagaagaagaaatcttctctaaagaacagttcattgaaatttttgacccagctcgtttatcaaaatctccagcactatttgatacaagcaaattacgttggatgaacaaccaatacatgaaaaaattggatttagacgaggtagtagctttatcagttccgcacttagtgaaagctggaaaagttgaagaagcgcgcgatgcagaaacagaacaatgggtacgtgacttagttgctctataccaagaacaaatgagctttggcgctgagattgttgaacttactgaaatgttctttaagaaagaaattgattacagtgaagaagcaaaagcagtgcttgctgaagaacaagtaccggaagtgttaaaagcatttgctgaagagatttcttccttagaagaattcagcgctgatgaaattaaggcagcaacaaaggctgtacaaaaagcaacaggtcaaaaaggtaaaaaactatttatgccaattcgtgtagcaacaacaggcgaaacacatggtcctgagcttccaaaagctatttctcttttaggaaaagaaacagttttagctcgtttagaaagcatttatagttaacaaatttctattttgcccatatgataaaataatcaaatatggatatcgttgagaaggaagagtaggcaagttcattgcatatcagagagggttatcaccggctgaaagtaacctatgacaaaacttgttgaagtgcgcctttgagtcttttgttgaatgctactaagtaagtaggcaaaagcgggtactttcacgttatgagagaagagttgggatcgtttgttgatccaaacagagtggaaccgcgtatatacgtctctgtgtcatttgacataggggcgtttttttatacaatcaatgagtagatagagaaatagcggaattggggtgagatgatgctaaagttgttaaaggaagacattgaggccatatttgaacaagatcctgcagcaagaagttatattgaagtgatattaacctattcagggttgcatgctatttgggcacatagattagctcatgggctttttaaaagaaagtggttttttctggcacgtgtaatctcacaaattagccgattcttcacagggattgaaattcatccgggtgcgaaaattggccgccgattttttattgaccacgggatgggaattgttattggggaaacgtgcgaaattggagataatgtaacagtatatcaaggagtaacactcggaggaacagggaaagaaaaaggaaagcgtcacccgacgatcgaagacaatgtcttaattgcaacaggtgctaaagtgctagggtcgattacgattcatgcgcactccaaaattggagcgggctcagttgtgttaaatgacgtcccagaaaactcaacggttgttggtatccctggccgagtcgtcattcaaaatggcgtccggattccaaaagatttgaatcatcaagatttgccagatccagatgcagagcgttttaaacagctagagaaagaaattttacacctgcaaaatcaattaaaggaattaaaagaagggaagattcaccatggcaattaagctatataacacgttaacacgtcaaaaagagacgtttgtaccgctggaagaaaacaaagtcaaaatgtacgtgtgcggaccgaccgtgtataactatattcatattggaaatgcgcgtcctgcaatcgtatttgatacggtgcgccgctatttagaatttagaggttacgatgtagagtatgtctcaaacttcacagatgtggatgataaattaattaaggcagcaaaagagttaggagaagatgttccaacgatcgcaaaccgctttatcgatgcctactttgaagatacgtcagctcttggatgcaagcatgccgatgtgcatccacgcgtaactgaaaatatggatatcattattgagttcattgatgaactggtgaaaaaaggatatgcatatgagtcagagggtgatgtatactatcgtacacgtaagtttgaaggatacggaaaattatcacatcaatctattgatgaattgcaatccggtgctcgtatcgaagttggagaaaagaaagaagatccattagactttactctttggaaagcaaccaaagatggggagatcgcatgggatagcccttggggtcaaggaagaccaggctggcatatcgagtgctctgcgatggcacgcaagtatttaggtgatacaattgatatccacgcaggcggtcaggatttagctttccctcatcatgaaaatgaaatcgcccaatcagaagcgctcactgggaaatcgtttgcgaaatactggcttcataacggatatatcaatattgataatgaaaagatgtctaaatcactagggaacttcgtgttagttcatgacattattaaaaagcatgatccgtccctacttcgattctttattttatctgttcactatcgtcacccgattaactataacgaagaaattttagagaatacgcgcaaagggtttgagcgtctgcaaacagcttacggcaacttaactcaccgtctagaggcagcaacaaatcttcaagaagatgcttcagaatggttcgaaaagctaaaagagcttcgcgaaacgtttgttgaagagatggatgatgattttaatacggcaaatgccatttctgttctgttcgagctagcaaagcaagctaacttgtatttattagaacaaacaacgtctacagatgtaattgaagcctttattaaagagtttaaagaattaggtgctgcaataggcattacgtttggagaagctgaacttctagacgaagaaattgatcaattgatccaagatcgtattcaggctcgtaaagatcgtaatttccaattagcagatcaaattcgagatgaattaaaggctaaaaatattattttagaagataccgcacaaggaacaagatggaaaagaggataatagtgttatgagcagcagtaaattagatgtaaaacagctaaatagcttagctcttgcttatatgggtgatgcggtgtttgatttacatgttcgccgccacctgctggtgttagggacagtgcgccctaaccagcttcataataaagctaaaaaatatgtatcagcaaaagcacaagcgcaaatcgtatattattttaaaaatgaaaacttttttactgaagaagaagaaggtgtactgcgccgaggacgcaatgcaaagtccggtacagtccctaaaaacacagatgtgcaaacgtatcgctacagtacagcatttgaagcggtcgtaggctatttgtatcttttaggtgaagaagaaagaatgatggaacttattactaaagctatctctttcgtcgatgaaggagagggaggaatgaatcatggaacatgaatttattattggacgtaatccggtcctagaagccctaaagtctgggcgtgacattaacaaactatggattgccgaaggatcgcaaggcggttctatggggcaaatcacgcagttagcaaaacgtaatggtgtattagtgcagtttgtaccgaaaaagaaaattgaacaaatggtagacggtattcatcaaggagtagctgcacaagttgctgcttatcaatatgcagagttagatgatttatttaacttagcggaaaaacgtaatgaaagtccgttttttcttctgctagatgagcttgaagatccccataatttaggttctattatgcgaacagccgatgccgttggcgcacacggtattattattccaaagcgccgttcagttggattaacggccactgtagctaaggcctctacaggagcgattgaacatgttcccgtagcaagggtaacaaacctatcaaggacgattgatgaattaaaagatcgaggcgtatggattgttggaacagatgcgaaagaaagcgatgattatcgcaacttagatggaggtatgccgcttacgttagtgattggaagcgaaggaaaaggcatgagtcgtttgattcgtgaaaaatgcgacttccttgtacaacttccgatggttgggcatgttacatcgttaaatgcatctgtagcagctagtcttctcatgtatgaggtttaccgaaaacgccatcctctaggtgaataagaatggatattctactggtggatggttataacatgataggtgcgtggcccgacctaagaaagcttagagataatgatttagccggtgctcgagacctgttaatcgaaaagatggcagagtatcaagcatatatggggtaccgtgtcattattgtcttcgatgctcatatggtcgaaggaattgaaaagaaggcaaaaaatcataaggttgacgttgtatttacaagagaaaatgaaacagcggatgagtacattgaaaagctggctcaagagctaagcaatgtaaagacacagattcatgttgctacatctgatttcacggagcagtgggcaatctttggacaaggtgcgctcagaatttctgctcgagaattgtacaacgaaattgagcagattgagaaacatattaatcttgatgtgaagtctattcaaaatcaaaagccagcggcacgcattcaactttccaatcaagtagccgaaattttcgaaaaatggcgtcggggacagcggtgaggttattgacggtacggaattagctactgtataatatttctatctactgtgcggtcggggggatcgatatgggcgataattatgggagaaaactgcatgctcatttcgaacaacaagaggatgaaacagttgtcgatcttgtgcataaaggcgatattgacgcattagagtatttgattcataaatacaaaaactttgtgcgagcaaaggcgcggtcatattttttaattggggcagaccgtgaagatattgtacaagaaggtatgatagggttatataaggcaattagagattttagagaagataagctaacttcgtttaaagcttttgctgaactttgcattaccaggcaaattattaccgctattaaaaccgcaacaaggcaaaaacatattccattaaactcttatgtatcattggacaagccaatatatgatgaagagtccgaccgaaccttaatggatgttatttcggggacaaaagtagcaaatccagaagagttgctcattaatcgagagaagtttgatgatattgaattaaagatggctgaacttttaagtgatcttgagcgaaaagttctcgttctttatttagatggtcaatcttatcaagagatttcagaagagttaaaccgccacgtcaaatccatcgataatgcacttcagcgtgtgaaaaggaaattagagcgctacctcgagattcgtgaaatcacaatgtagccttctatcctcatattgacatgctaagaaagtctgtgatacttttttatagacattatcactctataggtggttgacattatgcgtaaaaaagttgtacttgcgtgtgtgcaatgcgctagtcgtaactatacgactatgaaaaacacacagcaaaacgaagagcgtttagaaatgaagaagttttgcaaaacgtgtaacgcacatacgattcatcgtgaaacaaagtagatcaataatctgcacagactaataccccttttaatttattggaggttacaaacatgaaccgtgtaggaaatttcttacgtgatgttgggcgtgagatgaagaaggtaagttggcctaaaaaaaatgagctaactcgttatacaattactgttatttctacagttgtatttatgacactcttttttgtagtagttgattacggaatttcgtcacttattcgtttaatcccttgaataaattgacttaaatcatggtataataaagctaaattatgtttttttcagaaaagcccggagacgggttttttaatttgctttaagaatgattgtgctaggagtcaactattttcctagtgcgttgtctgtgcaatagattaggacatcttattttatagtgagctgggagggaaggacgtatagtcctcagaaatggagaaaaattggtatgtagtccatacttattctggatatgaaaataaagtaaaaacaaatttagaaaagcgcgtagaaacaatgggtatgcaagataaaattttccgcgttgttgttcctgaagaagaagaaagagaaattaagaacaacaaagaaaagattacaaagaaaaaagtatttccagggtacgtgttagttgaaatcatcatgacggatgattcatggtatgtagttcgtaatacacctggcgttacaggctttgtaggttcagcaggttctggctcaaagccaactgctcttctaccagaagaagtagaaatgatcttaaaacaaatgggcatggacgagaagcatgctgactttgactttgaactaaaagaaacagtattggttcaagaaggtccgtttgcaaacttcgaaggtaccattgaagaaatcgatacagataaacgtaaagttaaggttcatgtggatatgttcggaagacaaacgccagtagagctagactttacacaaattgaaaaaatataatctgtaagaccttgcaattcatgaagtttaatgttaatatttcataagtcagtatgtctcaaaactagagactaaaacaactatttctttattttatatataaagaacattgagtgggagggcatcgccctattaccacatcacggacttaaggaggtgtgtctcgtggctaaaaaagtaattaaacttgttaagttacaaattcctgcaggtaaagcaaatccagcgccaccagttggtcctgcattaggtcaagccggtgttaacatcatgggtttctgtaaggagtttaacgctcgcacagctgatcaagctggtcttatcattcctgttgaaatcacggtatttgaagaccgttcatttacatttattacgaaaactccacctgctgctgtactacttaagaaagcggctggtattgagtctggttctggtgaaccaaaccgtaataaagttgcaacagtcaagcgtgacaaagtgcgtgagattgctgaaactaaaatgcctgacttaaacgctgctagcgttgaatctgcaatgcgcatggtagaaggtacagcgcgcagtatgggaatcgtagttgaagactaattccatttgattgggtgttagaaggttgcgagaaatggaagttttcctatgctcgcaacctttattagtgggaggttattccgttaaaaccacataaggaggaaacaaaaatggctaaaaaaggtaaaaagtacgttgaagctgctaagcttgtagatcgtacacaaacttattcagtacaagaagcgattgaattagtaaagaaaacaaacacaactaaatttgatgcaactgtagaagtagcattccgtttaggagttgaccctaagaaagctgaccaacaaattcgtggtgcagtagtactaccaaacggtacaggtaaaactcaacgtgtattagtattcgctaaaggcgaaaaagctaaagaagctgaagctgcaggcgctgactacgttggcgatgctgactacatcaacaaaatccaacaaggttggttcgagttcgatgtaatcgtagctactccagatatgatgggtgaagttggtaaacttggtcgtgtattaggacctaaaggtttaatgccaaaccctaaaactggtacagtaacatttgatgttcaaaaagcagttaacgaaatcaaagctggtaaagtagaataccgcgttgataaagctggtaacatccacgtaccaatcggtaaagtatctttcgaagagagcaagttagttgaaaacttcactacaatcttcgaaactatggtaaaagctaagccggcagcagcaaaaggcacatacatgaagaacgtagctgttacttcaacaatgggccctggtatcaaagttgatactgcttcattctctgcttaataaatttggaaataaatcggtgttgactttttgaaagtccctgattataatagataatgttgttaaaaagaataacatttgtaccgtagacagtaggtgctgcaaagcttaatttcctaccgaggtgtgtgagataaattagtgaaacgttatggttcgcttactacacctccatgtctttattgtcatggaggttttttattgcaccttgtctgagtgtacggaaggaaatctacaggaggtgtaaagatgagcaacgtaattgaacaaaagaaacaagtcgtagacgaaattgctgaaaaacttcaagcgagtaactcaatagttgtcgttgactaccgtggtttgaatgttgctgaagttactgaacttcgtaagcaattacgtgaagcaggcattgagttcaaagtttacaaaaacactttaactcgccgtgctgtagaaaaacttgaactaacagatcttaatgatgcgttagtaggtccaaatgcaatcgcatttggtggagaagatgttgttgctccagctaaaattctaaacaacttcgcgaaagaacacgaagcgttagaaatcaaagctggtgtaattgaaggtaatgttgcatctgttgaagaaattaaagcacttgcagaactaccatctcgcgaaggcttactttctatgttgcttagcgtgcttcaagctccaattcgcaaccttgctcttgctacaaaagctgtggcagatcaaaaagaagaacaaggtgcataatctagtctgttatatataacacaatcacaaggaggaaattaacaatgactcaagaacaaatcattgaagcagttaaaaatatgactgttttagaacttaacgatttagtaaaagcaatcgaagaagaatttggcgtaactgctgctgctcctgtagctgtagctggcggtgctgctggtgaagctgctgctgagaaaactgaatttgacctagtacttgaaagtgctggcggacaaaaaatcaaagttatcaaagtagtacgtgaaatcactggtcttggcttaaaagaagctaaagaaatcgttgataacgctccaaaagctcttaaagaaggtatttctaaagaagaagctgaagaagcaaaagctaaacttgaagaagttggcgcttctgtagaagttaagtaattattgcttaacaactgatataaaaaagctcgcttgtacaagcgagcttttttgcttctgtcatccttttcatttatagtaaagaagaacatattgattaggaggttctattttgacagaacattatttttctaatacaccatcgtctgcaagtaatgaagagcgcttttcatttgaattgagaggaacctctttttcatttacgagtgaccgcggtgttttttcaaaaaaagagatcgattttggatcgcgcctgttaattgaaacgtttcaaatgcccgagagtcccggcccgcttctggatgttggatgcggatatggcccaattgggttggcgcttgcaaaagaggacagccaaagaaacgtccatatggttgatgttaatgaacgtgcattagcactagctcaaaaaaatgctgaagttaattcagtatcaaatgtttcaatctatcaaagctcttgctatgaaaatgtgaaggaaacgaattttgcagctattcttagtaatccgccgatccgtgcgggtaaaaaagttgttcatgaaattctagaaaaatcattagatcaccttgctgaccaaggagaactttggattgtgattcagaaaaagcaaggagcgccatctgctcttgcgaaattagaatctctatttaatgaagtagaagtagtagaaaagaaaaaagggtattatatcatatgtgctaaaaaatgttgactaatattttttagtatgttagcattataaaatgccaatatataaatattccatataagctcgggttatacataaaataaaaggtataattttgaattatatgggaaaaactaataaaatcaatagtacgtttttatgaaattgtggttttctatttaaagagaccatttttcttttgttcaataataaacatatggtttattatatattttgaataataacgcttgatttgaggggtgaatcagttgacaggtcaactagttcagtatggacgccaccgccaacgcagaagttatgctcgtattagtgaagttttagagttaccgaacttaatcgagattcaaacggcttcataccaatggtttttagatgaaggtttacgagaaatgttccaagatatttctccgattgatgattttacaggtaacttatcactagaatttattgattacagcttaggtgagccaaagtattcagtaggagagtccaaagaacgtgatgtaacttatgcagcacctcttcgtgttaaggtgcggttaattaataaagaaacaggtgaagtaaaagaccaagatgtgttcatgggagatttcccattgatgaccgaaacaggtacctttgtgattaatggtgctgagcgtgttatcgtatcacagttggttcgttcaccaagtgtttactatagtggaaagcttgataaaaacggtaaaaaaggatatacagcaactgttatccctaaccgtggtgcatggctagaatatgaaactgatgcaaaagatgtagtatacgtgcgtattgatcgtactcgtaaactgccagtaacagtgctgttacgcgcgctaggtttcggttctgaccaagagattatcgatttaatcggtgataatgaatacatccgtaatacgcttgaaaaagataatacggaaacaacggaaaaagcgctattagaaatctatgagcgtttacgtccgggtgaaccaccgacagttgagaatgcgaagtctctattagtatctcgcttctttgatccaaaacgatatgacttagcgaacgtaggtcgctataaaattaataaaaagcttcatatcaaacatcgcttatttaatcaaaagctagctgaaacattagttgatcctgaaacaggtgaaattattgcagaaaaaggcgcaatgattgaccgccgtctgctagatcgcttgattccgatgcttgaaggtggagtaaacttcaaaacttatagtccggttggtggagtagtagaagacgatgttacattacaatctattaagatttatgcgccaaatgatccagaaggtgaaaaaatcatcactgtatcaggtaacgcatatgtaacagaagaagttaaaaatatcacacctgctgatattttagcatcaatcagttacttctttaacttgcttcatcaagtaggagacacagatgatatcgaccacttaggtaaccgtcgtctgcgttctgtaggtgaattgttacaaaaccaattccgtatcggtttatctcgtatggaacgtgttgttcgtgaaagaatgtcaattcaagacacgaatacaatcacacctcaacaattaattaatattcgcccagttattgcggcgattaaagagttctttggaagttctcaattatcacagttcatggatcaaacgaatccattaggcgaattgacgcacaaacgtcgtctttcagctctaggacctggtggtttaacgcgtgagcgcgctggttttgaagtgcgtgacgttcactactcccactatggccgtatgtgtccgattgaaacgccagagggtccgaatatcgggttaattaactcactatcttcttatgcaaaagtaaacaaattcggtttcatcgaaacaccttaccgtcgtatcgatcctgaaacaggtaaagtgacagagcgaattgactacttaacagctgatgaagaagataactatgttgtagcccaagcgaacgctcgtctaggtgatgatggttcattcttagatgaaaatgtcgttgcacgtttccgtggagaaaacacggttatccgtcgcgatcgtttagattatatggatgtatcaccaaaacaagttgtatctgccgctacagcatgtatcccattcttagagaacgatgactctaaccgtgcattaatgggtgcgaacatgcaacgtcaagcagtacctttattaaatcctgaagcaccaatcgtaggtacaggtatggaatacgtatctggtaaagactctggtgcagccgtgatttgtaaatatcctggcgttgtagagcgcgtagaagcaaaacaaatttttgttcgccgctatgaagaagtagacggacaaaaagttaaaggtaacttagatcaatacaaattattaaaatttgttcgttctaaccaaggtacttgttacaaccagcgtccaattgtttcagttggcgacgaagtagtaaaaggtgagatcttagccgacggtccttcaatggaaaaaggtgagcttgctttaggacgaaacgtaatggttggtttcatgacatgggatggttacaactatgaggatgccatcatcatgagtgaacgccttgtgaaagatgatgtatatacgtctgttcatattgaagaatatgaatctgagtctcgtgatacgaagcttggacctgaagaaattacgcgtgacattccaaacgtaggtgaagatgcgcttcgcaacttagatgagcgtggaatcatccgcattggtgcagaagtaaaagacggagatcttttagttggtaaagtaacgccaaaaggtgtaacagaactaacagctgaagaacgtcttctacacgctattttcggtgaaaaagcgcgtgaagttcgtgatacttctcttcgtgtaccgcacggcggcggtggaatcattcttgatgttaaagtcttcaaccgtgaagatggcgacgaattaccaccaggtgtaaaccaattagtccgtgtatatattgttcagaagcgtaaaatttctgaaggtgacaaaatggccggtcgtcacggtaacaaaggtgtaatttcacgtattttacctgaagaagatatgccttatctaccagacggtacgccaattgacatcatgttaaacccattaggggtaccatctcgtatgaacatcggtcaggtgctagagcttcatttaggtatggctgctcgtaagcttggcattcacgttgcgtctccagtatttgatggtgcgcgtgaggaagatgtgtgggcaacaatcgaagaagctggcatgtctcgtgatgctaaaacagttctatatgatggtcgaacaggtgaaccattcgataaccgtgtatcagtaggaatcatgtacatgatcaaacttgctcacatggtagacgataaacttcacgctcgttctactggaccatactcacttgttacacaacaaccacttggtggtaaagcgcagttcggtggacagcgttttggtgagatggaggtatgggcacttgaagcatacggtgctgcttacacattacaagagatcttaacagtgaaatcagatgacgtagtaggtcgtgtgaaaacatacgaagcaattgttaaaggtgaaaacattccagaacctggcatacctgaatcgttcaaagtattaattaaagaactacaaagtttaggtatggatgtgaagatgctttctgctgacgagcaagaaattgatatcatggactcagaagaggaccatgagcaaccaacagaatcaattattgctgataacgaagaaagcctttctgaaggacaaaaagatcctgtcacaaaagagtaaggaattactttcatataaacgttaagggaaaaaacctgtagattaaaagggaggtaggctccttgctagatgtaaataactttgagtatatgaaaatcggtctagcttcgccagataaaattcgttcttggtcgtacggtgaggtaaaaaaacctgaaacgatcaactatcgtacgttaaaacctgaaaaagacggcttattctgtgagcgtatttttggtccacaaaaggactgggaatgtcactgtggaaaatataagcgcgttcgttataaaggtgttgtatgtgatcgttgcggcgtagaagttacgcgcgcaaaagttcgtcgtgaacgcatgggtcatatcgaactagctgcacctgtttctcatatttggtactttaaaggtattcctagccgcatgggacttgtcttagacatgtcccctcgtgcgctagaggaaatcatttattttgcttcttatgtagtaacagatgctggtgatacaccacttgaaaagaaacagcttttatcagagaaagaataccgtgcgtatcgtgagaagtacggacaaactttccatgcagcaatgggtgctgaagctgttaagaaattattgcatgacatcgatcttgataaagaagtagatgctttgaaagaagaattgaaaactgctcaaggtcaacgtcgtacacgtgccattaaacgtttagaagtactagaggctttccgtcattctggtaacgaaccttcttggatgattttggacgttctaccggttattccgccagaacttcgtccaatggttcaattagatggtggacgctttgctacgtctgatctaaatgatttatatcgccgtgtaattaaccgtaacaaccgcttaaagcgtttattagaccttggagctcctagcattatcgttcaaaacgaaaagcgtatgcttcaagaagctgtagatgcattaatcgataatggtcgtcgcggacgtccggtaacaggaccaggtaaccgtccattaaaatctctttctcacatgttaaaaggtaagcaaggtcgcttccgtcaaaacttattaggtaaacgtgttgactactctggccgttcggtaatcgttgtaggtccgaacttaaagatgtatcaatgtggtcttccaaaagaaatggcgttagagcttttcaaacctttcgtaatgaaagagcttgttgaacgcggtttagctcataacatcaagagtgcaaaacgtaaaattgaacgcgtgcaacctgaagtatgggacgtattagaatcggttattaaagagcatccagttcttttaaaccgtgcaccaacgctacacagactaggtattcaagcatttgaacctacgcttgtagaaggtcgcgctatccgtcttcacccgcttgtatgtacagcatataacgctgactttgacggtgaccaaatggcggttcacgttccattatctgcagaagcacaagcagaagcacgtatcttaatgcttgctgctcaaaatatcttgaaccctaaagatggtaaaccagttgttacaccttcacaggatatggtattaggtaactactacttaacgcttgagcgtgaagaggcagttggagaaggtatggtattcaaggatacaaatgaagcactattagcgtaccaaaacggttatgtgcatcttcatacacgtgtaggtgtgtatgcaggttctttaaacaacgaaacgtttacagaagcacaaaatcaacagttgcttgttacaacggttggtaaattagttttcaacgaaattttaccaaaatcgttcccatacattaacgaaccaacaagagaaaacttagaagtgaaaactcctgagaagtactttgttgaaaaaggtgcagatgtgaaggaattcatcaagaatcaaccggctatcgcaccgtttaagaaaaaaatcttaggtaatattatcgctgaagtatttaaacgtttcaaaattactgagacttctaaaatgcttgaccgtatgaaagacctaggtttcaaatattctactaaagccggtattacagttggtgtagctgatatcgtggttttaggagaaaaagaagttatcttaacagaagcgcaagctaaagtagataacgtactaaaacaattccgtcgcggtttaattactgaagatgagcgttatgagcgtgttatctctgtatggagtagcgcgaaagacgttatccaaggtaaattaatggcgtcattggacaaacgcaacccaatcttcatgatgagtgactctggtgcccgtggtaatgcatctaacttcactcagcttgcaggtatgcgtggactaatggccaacccgtctggtcgtatcattgagttaccaatcaaatctagtttccgtgaaggtttaacagtattagagtactttatctctacccatggtgcacgtaaaggtcttgccgatacggctcttaaaacagctgactcaggttaccttactcgtcgtttggttgacgtggcacaagacgttatcgtacgtgatgacgactgcggtacagaccgcggtattctggctgttgcaatcaaagaaggaacagaagaaattgagaaacttgatgagcgtctaattggacgttatgcaagaaaaacactacttcacccaggaacaaacgaagtgttagtgaaagaaaacgaactaattacagaagacctagctgaaacaattgtggatgctggtgttgaagaagtatggattcgttctgcattcacttgtaacactcgccacggtgtatgtaaaaaatgttacggtcgtaaccttgcaactggttcagaagttgaagtgggtgaagcagttggtatcatcgctgctcaatctatcggtgagccaggtacacagttaacgatgcgtacattccatacaggtggggttgctggagacgatatcactcaaggtttaccgcgtatccaagagatcttcgaagcgcgtaaccctaaaggtcaagccgttatttctgaaattgaaggtacaattgccggcatttctgaaggacgcgatcgtcaacatgaaattactgttcaaggagagattgaaactcgttcttacacagctccgtacagtgcacgtctgaaagttattgaaggacagcgcattgcacgtggtcaagaattaacagaaggttcaattgatcctaaagaattactaaaagtaaaagatatcacggctgtacaagagtacttgcttcgtgaggtgcaaaaagtataccgtatgcaaggggtagaaattggagataaacacgtagaggtaatggttcgccaaatgcttcgtaaagtgcgtgtaatggattcaggagatacagatgtattaccaggttcattacttgatattcaccaattcactgatgcaaatgaaaaagtattacttgaaggcaatcgtccagcgacgggccgtcctgtattacttggtattacaaaagcatctcttgaaactgattccttcttatctgctgcgtcattccaagaaacaacgcgtgttcttacggatgctgcaattaaaggaaaacgtgatgagttgcttggacttaaagagaatgttatcattggtaagctagttccggctggtacaggtatgacgagatatcgtaatgctgaaccgatcaaaaaccaagctgaagaaacggtaacaatcgactaattataaaatcattactctagaatggatgtttttttaaaaaactacaaaacgttagttgacatccattctagggaatgatactatatcaaaggtgctcctataaactacctgttactttggaggatatgataatgtcttatgaaaaagtattacaggctgatcatattattgtaggaacaaagcagacggtgaaagcattaaaaaaaggtacagtaaaggaagtcatcattgctgaagacgctgatttttatgtcacatccattgtggcaaaaacggcacagcaagaaaacgttccgtatacgtatgtcccttctatgcgaaagcttggtcaagcttgtaggatagaagttaacgctgcaactgttgcaattattagttaacacgtttttgaacttttagtttcaaagactttgttttttgctaaaaaatgaaccacctggatgtgtggtcttacaaaaggcgaaaggaggaaaatttaaatgcctactattaaccaattaatccgtaatggtcgtgtgagtaaaggtaaaaaatctgactcacctgctttaaacagaggttacaacagcttcaaaaaagctcaaactaatcaatcttctccacaaaaacgtggtgtatgtacacgtgtgggtactatgacaccgaagaaaccgaactcggctcttcgtaaatatgctcgtgtacgtttaacaaacggtatcgaggtaacagcttatatcccaggtattggtcacaacttacaagaacacagcgtggtacttatccgcggtggacgtgtaaaagatttaccaggggtacgttaccatatcgtacgtggtgcacttgatactgctggtgtggatggccgtatgcaaggtcgttctaaatatggtactaagcgaccaaaagcagctaaaaaataatagcttaacaattaatagataaacttttaaaagtgaaaggaggaagtagaatgccacgtaagggacctgttgcaaaaagagacgtattaccagatccgatttacaattctaagcttgtatctcgcttaatcaacaaaatgatgcttgatggaaagcgcggtaagtcacaagctattctttatagagcattcgatttagtacaagagcgcagtggtaaagaagctatggaagtattcgaccaagctcttaaaaacatcatgcctgtactagaagttagagcacgccgtgtagggggttctaactaccaagttcctgtagaagtacgtccagagcgtcgtactactttaggtcttcgttggttagtaaactatgctcgtcttcgtggagaaaaaacgatggaagagcgtttagctaacgaaatccttgatgcagctaacaacactggtgctgcagttaagaaacgtgaagatactcacaaaatggcagaagctaacaaagcatttgctcattaccgttggtaatcttttaacgaaactttttaaaaaacaaattataatatggaaggagaaatacctaagatggcaagagagttctccttagaaaacactcgtaatattggaatcatggctcacattgatgctggtaaaacaacaacaactgagcgtgttctttattatactggccgtatccataaaattggtgaaactcatgaaggagcttcacaaatggactggatggagcaagagcaagaacgtggtatcactatcacgtctgctgcgacaactgctgcttggaaaggtcaccgcgttaacatcatcgatactcctggacacgtagacttcactgttgaagttgagcgttcattacgtgtacttgatggcgctgtggcagttcttgatgctcaatctggtgttgagcctcaaacagaaacagtatggcgtcaagcgactacgtacggtgttccccgtgtcgtattcgttaacaaaatggacaaaattggtgctgacttcttgtactctgtaaaaacgatccacgatcgtttaggtgcaaatgctcacccaattcagttgccaattggtgctgaagatgagttcgaagcaatcattgacctagtggaaatgaaagcatacttctacgaagatgacttaggtactcgttcagagtctcgtgaaattcctgaggaatacaaagagcaagctgaagaataccgtgcaagcttagtagaagctgttgcagaacttgacgaagaattaatgatgaagtacttagacgaaggcgagcttacagttgaagaactaaaagctggtatccgtaaaggtacttgtgacgttgaattctacccagttatctgtggttcagcattcaaaaacaaaggtgtacaattaatgctagatgcagtaattgattacctaccgtctccagtagatgtaccatcaatccaaggtatcgtacctgacacagaagaagaagttacgcgtgagtctagcgacaacgctcctttctcagcattagcgttcaaagttatgacggacccttatgttggtaaattaacattcttccgtgtgtactctggtgtactaagctctggttcatacatcaaaaactctacaaaaggtaagcgtgagcgtgtaggtcgtatcctacaaatgcatgctaactctcgtgaagagatttctgaagtatacgctggagatatcgcggcagctgtaggattaaaagatacttctactggtgatactctatgtgacgaaaagagtcttgtaattcttgagtctatggaattcccagagccagttatctctttatctgttgagccaaaatcaaaagctgaccaagataaaatgactacagctcttcaaaagttacaagaagaagatccaactttccgtgcggaaactaatacagagactggtcaaatcatcatctctggtatgggtgagcttcaccttgatatcatcgttgaccgtatgcgtcgcgaattcaaagtagaagcaaacgttggtgctcctcaagtagcttaccgtgaaactttccgcgctggtgcgaaagttgaaggtaaattcgctcgtcaatctggtggtcgtggacaattcggtcacgtttggattgagttcgaacctaacgaagaaggaaaaggctttgaatttgagaacaaaatcgttggtggtgtagttccacgtgaatacatccctgcagttcaagctggtcttgaagatgcattacaaaacggtgttgttgctggttatccattaatcgatatcaaagctgctttagttgatggatcttaccatgacgttgactcaagtgagatggcgtttaaaattgccgcttctatggctcttaaaaacgcagtatcaaaatgtagcccagctatccttgaaccaatgatgaaggttgaagttgttatccctgacgaatacttaggagatatcatgggtgacattacgtctcgtcgtggacgtgtagaaggtatggaagcacgcggtaacgctcaagttgtacgtgcattcgttccactttctgaaatgtttggttatgcaactgcattacgttcaaacactcaaggtcgcggaacatattctatgcacttcgatcactacgaagaagttcctaaatcaatttcagaagaaattattaaaaaaaataaaggtgaataattgattttcactctttattgaagtataactacttatgtacgctgtgaaagtggagttcattccctttcacggcctcataaaacataaactacatgaattttaaggaggattttcgaatggctaaggaaaaattcgaccgttcaaaaacacatgccaatatcggtacaattggtcacgttgaccatggtaaaacaactttaacagctgctatcactactgttcttgctaagaaaagtggtaaaggtgcagcaatggcttacgacatgatcgacgctgctccagaagagcgcgagcgtggaatcacaatctcaactgcacacgttgagtacgaaactgacactcgtcactatgcacacgttgactgcccaggacatgctgactatgttaaaaacatgatcactggtgctgctcaaatggatggcggtatcttagtagtatctgctgctgatggtccaatgccacaaactcgtgagcacatccttctttctcgtcaagtaggtgtaccttacctagttgtattcttaaacaaatgtgacatggtagacgacgaagagctacttgaattagtagaaatggaagtacgtgaccttctttctgaatacgacttccctggtgacgatgtaccagtaatcaaaggttctgctcttaaagctcttgaaggcgaagctgattgggaagctaaaatcatcgagcttatggacgctgttgatgagtacatcccaactccagaacgtgacactgaaaaaccattcatgatgccagttgaggacgtattctcaatcactggtcgtggtacagttgctacaggtcgtgtagagcgtggacaagttaaagttggtgacgttatcgacatcatcggtttaactgaagagccaaaatctactactgtaacaggtgtagaaatgttccgtaagcttcttgactatgctgaagctggcgacaacatcggtgctttacttcgtggtgtagcacgtgaagaaatccaacgtggacaagtattagctaaaccaggctcaatcactccacacactaaatttactgctgaagtatacgttctttctaaagacgaaggtggacgtcacactccattcttcacaaactaccgtccacagttctacttccgtacaactgatgtaactggtatttgtaacttacctgaaggcgtagaaatggtaatgcctggcgacaacatcgaaatgactgttgaacttatcgctccaatcgcgattgaagaaggtactaaattctcaatccgtgaaggtggacgtacagtaggcgctggcgttgtagctaaaatcagcgagtaatttctcgtttcagtaaagggagtagggtaacctactccttttttatttggtgataaaaggtaaagatagtttttactattacacttgcaaaatgatctccttttatatataatgaaaaaagtgtgcgacacataaaaaagttttttaactttattgttgcaatatgaacccatttttagtataataaaaatgttggtctttgactgcgatgatgcggaaggttgccgacacacccggccgctttgccatggcgagtgtggggaaatttccgcggagaatgtctattgtaaaataggcgaaaaaggagggaaaataatggcaaaagaaaaaattcgcattcgtttaaaagtatatgatcacagaattcttgatcaatctgctgagaaaatcgtagaaactgcaaaacgttctggtgcggctgtatctggtccgattccattaccgactgaaaaatcaatttatacaattctacgtgcagtacacaaatataaagattctcgtgagcagtttgaaatgcgcacgcataaacgcttaattgatatcgtgaatccaacaccacaaactgttgattcattaatgcgtttagacttaccatctggtgtagatatcgaaattaaactttaatttaaaataaagaatgaaaagatacttaggaggtgtgactaatggccaaaggaatcttaggaagaaagatcggtatgactcaagtatttgctgaaaatggtgacttgatcccagtaacagtaattgaagcttctgctaacgtagttcttcaagttaaaaacgctgagacagacggttacgaagcgatccaattaggtttcgaagatatccgtgaaaaactatctaacaaacctgcaaaaggacatgctactaaagctaatactgctcctaagcgcttcatccgtgagttacgcggtgtggacgcttcagcatatgaagttggtcaagaagtcaaggttgatattttcgcagaaggcgatgtaattgatgtaacaggaatctcaaaaggtaaaggtttccaaggtgctattaaacgccacggacaatctcgcggacctatgtctcatggttctcgctaccaccgtcgcccaggttcaatgggtcctgtagctccaaaccgcgtatttaaaggtaaattattaccaggacgcatgggtggagagcgcatcactgtgcaaaacttatcaatcgttaaagttgacgcagaacgcaatcttttattagtaaaaggtaacgtgccaggagctagaaaatctctagttactgttaaatctgcagttaaatctaaataataattcttcgagaaaggaggaataaccaatgccaaaagtagcattgtttaaccaaaacggtgaaaacgttggagaaatcgaacttcaagatgccgttttcggtatcgaaccaaacaacaaagtacttttcgacgcgatcgtaatgcaacgcgcatctcaacgtcaaggtacttctaaagttaaaaatcgttctgaagtaagaggcggtggccgtaagccatggcgtcaaaaaggtactggtcgtgctcgtcaaggatctatccgttctccacaatggcgtggtggtggcgtagtatttggtccagttccaagaagctatagctacaaattacctaaaaaagttcgtcgtttagcaattaagtctgcattatcaactaaagctcaagataacagcatcgttgttcttgaagctctttcttttgacgctccaaaaacaaaagaaatggtagcagttcttaaaaacctaacagtagaacgcaaagcattagtagtaactgcggatcttaacgaaaatgttgcactttcagcacgtaatattcctggtgtaacagttgttgcagctaatggtttaagcgtattagacgttatgaaccatgataagcttgtaatcactaaagacgcagttgaaaaagtagaggaggtgcttgcataatgaaagatcctcgtgatattattaagcgccccgtaattacagaacgttcaacagacttaatggctgagaaaaaatatacgtttgatgttgatgtaagagctaataaaactgaggttaaagatgctatcgaaaaaatctttgacgtaaaagttgaaaaagtaaacatcatgaactacaaaggtaaattcaagcgtgtaggtcgctacagtggtcttactaaccgtcgtcgtaaagcggtagtaacactaactcaagagagcaacgaaatcgaattcttcgaagcttaagattaatagagaaggagggaaattgagatggcgattaaaaagtataaaccaacctcaaatggtcgtcgtggtatgtcagtttctgatttcgctgaaattactactgacaaaccagaaaaatcgttacttgcacctgtcaagagaaaaggtggtcgtaacaaccaaggtaaattgactgttcgtcaccaaggtggtgggcacaagcgtcaataccgtatcatcgattttaaacgcgataaagatggaatacctggacgcgttgctacaatcgaatatgatccaaaccgttcagctaacatcgcattaattcattatgctgatggtgaaaaacgttacatccttgctcctaaaaacctaaaagtaggtttagaagttatgtcgggtcctgaagctgacatcaaagtaggtaacgcgcttcctttagctaacattcctgttggtacagtagtacacaacatcgaattgaaacctggtaaaggtggacaattagttcgttctgcaggtacatctgctcaagtacttggtaaagaaggtaaatacgtattagtacgtttaacttctggtgaagtacgcatgattcttgcaacttgtcgtgcaactgtaggtcaagttggtaacgaacaacacgagttaatcaacatcggtaaagccggtcgttctcgttggttaggtatccgtccaactgtacgtggttctgtaatgaaccctaacgatcacccacacggtggtggtgaaggacgtgctccaatcggacgtaagtctccaatgagtccatggggtaaaccaacacttggttacaaaactcgtaagaagaaaaacaaatccgataaatttatcgttcgtcgtcgtaaaaaataacgggattgagctacggttcaaacgaaccgtaggacaatcacgaagggaggttcatttatgggtcgcagcttaaagaaaggaccttttgtagatgaccatttaatcaacaaaattgagaagttaaacgaaactgacagcaagcaagtagtaaaaacttggtctcgtcgttcaactatcttccctcagttcattggtcatacaattgctgtatatgacggtcgtaaacatgtaccagtttatgttactgaagacatggtaggtcacaaacttggtgaattcgcaccatctcgtacttacaaaggtcacgcaagtgatgataagaaaacaagacgctaatatgagaggaggcttttaaatgcaagctaaagctgtcgcgagaacagtacgtattgctcctcgtaaagttcgtttagttgtagatttaattcgaggtaagcaagtgggtgaagcgctagcagtgctacttcacacgccaaaggctgcttctccagtcgttgagaaagtattaaaatctgctattgccaatgcagaacacaattatgaaatggacgctaacaatttagttattactgacgcttttgttaacgaaggtccaactttaaaacgtttccgtccacgcgctatgggacgtgcaagccaaattaacaagcgcacaagccacatcacaatcgtggtatcagaaaagaaggagggataattcatgggtcaaaaggtaaatccggtcggtcttcgcgtcggtgtcatccgtgattgggaatcaagatggttcgctggcaaagactacgctgacttattacatgaagacttaaaagtacgtgaatatatcgctaaacgtttaaacgatgcagctgtttctaaagttgaaatcgaacgcgctgctaaccgcttaaacgtaacgatccacactgcaaaacctggtatggtaattggtaaaggtggtactgaagtagaatcacttcgtaaagctcttaaccaattaacaggcaagcgtgtacacattaacatccttgaaattaaacgagcagatttagatgctaaactagtagctgaaaacatcgctcgccaacttgagaaccgtgtatcattccgtcgtgctcaaaagcaagctatccaacgtagcatgcgtgctggcgcacaaggtatcaaaacaatggtatctggtcgtttaggcggagctgatattgctcgttctgaatattacagtgaaggtacagttccacttcatacacttcgcgctgatattgactatgctcacgctgaagcagatactacttatggtaaacttggtgtgaaagtatggatctatcgtggagaggttcttcctactaaaaagaaaactgaggaaggaggaaaataattatgttattaccaaaacgcgttaaatatcgtcgcgaacaccgcggaaaaatgcgtggacgcgctaaaggtggtacggaagtacatttcggtgaattcggtttacaagctactgaagcttcttggattacaaaccgtcaaatcgaagctgctcgtatcgcaatgactcgttacatgaaacgtggcggtaaagtatggattaaaattttcccttctaaaccttatactgctaagcctctagaagtccgaatgggttctggtaaaggtgctcctgaaggttgggtagcagttgttaaacctggaaaagtaatgtttgaaatttcaggtgtacctgaagaggttgcacgtgaagctttacgtttagctgcacataagctacctgtaaaatgtaagtttgtaaaacgtgaagaaattggtggtgattctaatgaaagctaatgaaattcgtgaccttaccactgctgaaattgaacaaaaagttaaggctttaaaagaagagttgtttaaccttcgtttccaattagcgactggacaattagagaatactactcgtattcgcgaagtgcgcaaatcgatcgctcgtatgaaaactgtagttcgtgaaagagagattgctgctaataaataattaagtctgagaggaggctttcagaatgagtgaacgcaaccaacgtaaagtttacactggccgcgtagtttctgacaaaatggataagactgttactgttcttgttgaaacttacaaaaagcattcgctttatggcaagcgtgtaaaatactcaaagaaattcaaagctcacgatgaaaacaatacagctcaactaggcgatatcgtgaagatcatggaaactcgtccgttatcagctactaaacgtttccgtctagtagaagttgtagaaaaagctgttatcatctaatagttaagatagatcggataagaatgattcatccgaagggaggtttcgtacatgattcaacaagaatctcgtttaaaagttgcagacaactctggtgcacgtgaggtacttactattaaagtacttggtggttcaggtcgcaagacagcaaacattggtgatgttatcgtttgtacggtgaaacaagcaacaccaggaggcgttgttaaaaaaggtgacgttgttaaagctgttgttgtacgtacaaaaagtggtgttcgccgtactgacggttcttacatccgtttcgacgaaaatgcttgcgtaatcatccgtgacgacaaaggaccacgtggtactcgtatcttcggaccagttgctcgtgaattacgtgataacaacttcatgaagatcgtatcattagctccagaagttatctaattgatatatagaacaaatacaaaatgccttttaaggaggtgcgaataggatgcatgttaaaaagggcgacaaagtagtggttatctctggtaaagacaaaggtaagcaaggtgaagtacttgcagctttcccaaagaaagaccgtgtacttgttgaaggtgtgaacgttgtgaaaaaacactctaaaccttctcaagtaaatccacaaggtggaatcgttagccaagaggcacctatccacgtatcaaacgtaatgccgttggatcctaaatctggtgagccaactcgtgttgggtaccaagttatcgatggcaaaaaggtacgtgtagcaaaaaaatctggtgaaactttagataaataattaatgaaatgtgaagggaggtttagttcacatgaaccgtcttaaagagaaatttacaaaagagattactcctgctctagttagcaagtttaattatgaatctgtaatgcaagtgccaaaaatcgacaagatcgtaatcaacatgggtatcggtgatgctgtttctaactcaaaagctttagataacgctgttgaagaactagctgaaatcactggtcaaaaacctgttgtaactcgtgcgaaaaaatctatcgctggtttccgtcttcgtgaaggtatgccaatcggtgcgaaagttactttacgcggcgagcgtatgtacgaattcttcgataaactagtatcagtatcacttccacgtgtgcgcgatttccgtggtgtatctaaaaaagcatttgatggtcgtggaaactacacgttaggtgttaaagaacaattgatcttcccagagatcgattatgataaagtaactaaagttcgtggtatggatatcgttattgttacaacagcaaacactgatgaagaagctcgtgagcttttaactcagttcggtatgccattccagaagtaataactgccaacgttaagcagaggaggcgaaaatgtggctaaaaaatcaatgattgcgaagcaaaaacgccagcaaaaattccaagtacaagagtatacacgttgcgaacgttgtggacgtccacactcagtactacgtaaattcaagctttgccgtatttgtttccgtgagcttgcttataaaggtcaaattcctggtgttaaaaaagctagttggtaaaacccaagtttgggaaggaggtaaattaatatggtaatgactgatcctattgcagatttactaactcgtatccgcaatgcgaacatggttcgtcatgagaaaattgaagttcctgcttctaacattaagaagcaaattgcagaaatccttaagcgtgagggtttcgtacgtgatgtagaatacatcgaagacaacaaacaaggtattatccgtatcttcttaaaatacggttcaaataacgaacgtgtaattacaggcttaaaacgtatcagtaaacctggtctacgtgtttatgcaaaaaataacgaagtaccacgtgtacttaacggtttaggtatcgcaatcgtttctacttctcaaggtgttttaactgacaaagaagctcgtcaaaagcaaactggtggagaagtattagcgtacgtttggtaataagttttaaatgtgaatggaggtgtaactatgtcacgtgttggtaaaaagcctttagaacttccagcaggtgttacagttacgaacgagagcaacactgtaactgtaaaaggaccaaagggtgaattaactcgtacattccaccctgaaatcgaaattaaagttgaagacaacgtattagttgttaatcgtcctagtgacaataaagagcaccgcgctcttcacggaactactcgtagccttttaggtaacatggttgaaggtgttactaaaggattcgaacgtggtttagaattagtcggtgtaggttaccgtgcacaaaaatctggtagcaaattagtattgagcgttggatactctcacccagttgagattactcctgaaacaggaatcgaaatcgaagttccttctcaaactaagatcgttattaaaggtattgataaagaacgcgtaggtgcattagctgcaaatattcgtgacgttcgtccaccagagccttacaaaggtaaaggtattcgttacgaaggcgaatatgtacgtcgtaaagaaggtaaaactgctaagaagtaatgccggttaggtaaaagaaaggagtgcccgaaatgatcacgaagcttgataaaaacaaagttcgtaaaaaaagacatgctcgtgttcgtgcgaagttatctggaactgcaactcgtccgcgtttaaacgtgttccgttctaatcaacatatttacgcacaagttatcgacgatttaaattcagtaacaatcgcaagtgcttcaacgttagataaagacctgactttagaaagcactggtaacactgaagctgctatcaaagttggcgaattagtcgctaaacgcgcagtagaaaaaggtgtaaacgaagtagtattcgaccgtggcggttatttatatcatggccgtgttaaagcattagctgacgctgctcgtgaagctggattacaattctaattgtaaaaggagggaaaatcatgcgtcgtattgatccaaataaattagagcttgaagaacgtgttgttaccgttaaccgcgtagctaaagttgtgaaaggtggacgtcgtttccgcttcgctgcattagttgtagttggtgacaaaaacggtcacgttggattcggtactggtaaagcacaagaggtaccagatgcaatccgtaaagcaattgaagatgcgaagaaaaacttaattactgtacctatggttggtacaactattccacacgaaatccttggacaatttggtgcaggtcaaattttcttaaaacctgcttctgaaggtacaggagttatcgctggtggcccagttcgtgcggtactagaattgggtggagtaagtgatattctatctaaatctttaggttcaaacactccaatcaacatggtacgtgcaactcttaacggtttagctaacctaaaacgtgctgaagatgttgcaaaactacgtggcaagactgtagaagaactgttaggataagggagggatatggaatggcaaacaaactagcaattacccttactcgtagcgtaattggtcgtccagaagatcaacgtgtaactgttcgtacacttggcctacgtaagttaaatcaaactgtcgttcaagacgataatcctgcaattcgcggaatgattaacaaagtagctcaccttgttacagtaaaagagcaataagtataaattgtcactctaaggaggtgctccggaatgaaacttcatgaattgaaaccagctgaaggttcacgtaaagtacgtaaccgtgtaggtcgtggtactggttcaggtaacggaaagacttcaggtaaaggtcacaaagggcaaaacgctcgctctggcggtggcgtaagacctggcttcgaaggtggtcaaactcctttattccgtcgtcttccaaaacgtgggttcactaatatcaatcgcaaagaatacgcgatcgttaatttagaagctcttaaccgttttgaagatggaactgaagtaacaccagaattattaatcgaaactggtttagtaagcaaagcaaaagctggcgttaaagtactaggaaacggtacattaaactctaagctaactgttaaagctgctaaattctcttcaactgctaaagaagctatcgaagctgctggcggtacagttgaggtgatctaatgtttcaaacaatctccaatttaatgcgcgtgcgtgaaataagacaaaaaatctttttcactttgttaatgttaattgtcttccgaattggtacatttattcctgtacctagtgttaatacggatgtactaaaattgcaagatgggttaaatgtattcggggttctgaatacatttggcggcggcgcgttaaaaaacttctccattcttgctatgggcattatgccttatattacagcatccatcatcgtccaattattacagatggatgttgtacctaagtttacagaatggtcaaagcagggagatgttgggcgccgtaaattagctcaagtaactcgttatggaacaattgtgcttggatttatccaggctttaggtatgtctataggattcaacaatatttcgggcggacaattgatcgctaatccaggaatttctacgtatcttctaattgctacagtgttaacggcaggtactgccttcttaatgtggttaggagagcagattactgcaaaaggcgtaggtaacggtatttctatcattatctttgctgggattgcagctggtattccgacaacattaaatcaaatttatgcacagcaatttgaagacgttggggatcaattattcattcgtatcgtaacggtagttttaattgcgattgcagttttagctattattgttggggttatttacttccaacaagcgctacgaaaaattcctattcaatatgcaaagggttcagctggtcgtaatcctgttggaggtcaatccactcatttgccgttaaaagtaaatgcagctggggttattcctgttatctttgcagtttcatttattattacaccaccaacaattgcatcatttttcggtccaaatgatgtaacggcgtggattcagaatacatttgactatactaagccaattggtatgatagtgtatgtagcgttaatcattgctttttgttacttctatacttttgttcaagttaaccctgaacaagtagcagagaacttgaaaaagcaaggtggctacatcccaggcatccgtcctggtaaaagcacacaagcttatttaacgaaagtgttatatcgtctgacattaatcggttcgatattccttgcgttaattgctgtgttgccggttctgttcatcaaaattgcaaacttaccatcatctgctcagatcggcggtactagtttgttaattgttgtcggtgtagctcttgagacaatgaaacagcttgagagtcaattagtgaaacgccattataagggatttattaagtaaagctgtttagtgggaagcaagctgctttcccattaaacggataagatactgagggggaagcaagaaatgaatttagtgttaatgggccttcctggtgctgggaaaggtactcaagcagaaaaaatcgttgagcattacgatatccctcatatctcaacaggagatatgttccgagctgcaattaaagaaggaacgcaactaggtttaaaagctaaatcatttatggatcaaggtaaccttgttcctgatgaagtaacaattggaattgtgcgcgagcgtttaaacaaacaagattgtgaaaacggctttttacttgatggcttcccaagaacagtagcccaagcagaagctcttgaaacaattacaaaagaactaaacaagcaaattgattatgtgattaatattgatgtagatcaaagcattttaatggagcgtctcactggacgccgcatttgtaaagattgcggagctacttaccacttagtattcaatcctcctgcgaaagaaggagtttgtgacaaatgtggcggagagctttaccaacgtgcagatgacaatgctgagacggtttcaactagactttcagttaatgttaaacaatctcaacctctacttgatttctatcaagaaaaaggttatctacgcaatattaatggtaatcaagatattaacattgtgtttgaggatgttcgtcaattacttgctggggttaagcaatgatcatttgcaagacaccagaggaaattgaggtcatgcgtgaagctggaagaattgtggctttaactcatcaagagttaaaaaagcatatcgctccaggtattacgactatagaattggatgcaattgctgaaaattttattcgtcaacatgatgcaattccgtcttttaaagggtataatggttttcgcggcagtgtatgtgcttctgtgaatgaagaattagttcatggtattccgggtgaacgcaagcttaatgaaggagatatcatcagtttagacatcggagctaaattcggtggctatcacggtgattcagcttggacatatggagtaggaaagatttcattagaaaatcaagagctgcttaatgtgactgagcaatctctctacaagggattagcagaagctaagccgggtgagcgtttgtcgaatatttcacatgctattcaacagtacgcagaatcacgtaacttttcgattgtaagagaatatgttggccatggggtcggcaaagacttacatgaagatccgcaagtacctcattatggtccaccgaataaaggaccgcgtctacgtccaggcatggtattggcagttgagccaatggtgaatgctggtatgcgatatgtaaaaacattacctgataactggacagttgtcacagtagatggtaaaatgtgtgcgcacttcgaacatactattgcaattactgagacgggatatgaaattctgacagcattgtaatgttaaaggatgttatctctatccattcctcgctagatgcactggacagtaaacagtaattatctaaattcacgatgatcgtttttcgtctgaattgctgttaaaatggtaaagatgtatattagcgtcaatcatcttgaatttaatgattacgatctccggatgttcagaacaggttctttttaagtcgtttaatgatagcttgttactgtttcaaagaaaggagagcactttaatggcaaaagacgatgtaattgaagttgaaggtacagttgctgaaactttacctaacgctatgttcaaggtagaattagaaaatggtcatacagtacttgctcacgtatcaggaaaaattcgcatgcatttcattcgaatcttacctggtgataaagtaactgtagaattgtcaccatacgatttaactcgcggtagaattacgtaccgtttcaaataaaacctatgcactccgtactatcaaggaggtatgaaacatgaaagtcagaccatcagttaaaccaatctgcgaaaaatgtaaagttatccgtagaaaaggtaaagtaatggtaatttgtgaaaaccctaagcataaacaaaaacaaggttaatcaataaggaggtgcactattcatatggcacgtattgctggtgttgatattcctcgtgacaagcgtgtagtaatttcattaacatacattttcggtattggtcgtccaactgctgaaaaagttctagctgaagctggagtttctgaagatactcgcgttcgtgacttaacagaagaagaattaggtaaaattcgtgatattttagatagctataaagtagaaggcgatcttcgtcgtgaagtttctttaaacatcaaacgtttaattgagattggttcataccgtggtatccgccaccgtcgtagtttaccagttcgtggtcaaaacagtaaaaacaatgctcgtacacgtaaaggcccacgccgtactgtagcgaacaagaagaaataattagtaagggaggtcattaacagatggcacgtaaaactaatacacgtaaacgtcgcgtgaaaaagaatattgaagctggtgtagctcatattcgctcaacgtttaacaacactattgtaacaattacagatgttcacggtaatgcgattgcttggtctagtgcaggcgcacttggcttcagaggttctcgtaaatctactccatttgctgcgcaaatggctgctgaaactgctgctaaagtttctatggataacggaatgaaaactcttgaagttacagttaaaggccctggtgctggtcgtgaagcagctatccgtgctcttcaagctgcaggtttagaagtaacagctattaaagatgttactcctgtacctcacaacggatgccgcccaccaaaacgtcgtcgtgtataattaatatgtatagattctatttcgttgtctataatgatgatggtgtagaatttattcatgcaacgaaatgttttccatttgttgtgcacattcgggaactgtctaatagggaatttcggttaggcatttgagaaatcagccgtctagccgaggtttcgacgttttgaaggagggtttatattgatagagattgaaaagccaaaaatcgaaacggtagaaatcagcgatgatagaaagtacggtaaattcgtcgtcgaaccacttgagcgtggatatggtactactttgggtaactccttacgtcgtatcctattatcctcactccctggtgcagctgtaacatctattcaaattgaaggtgtattacatgaattttcaacagttcctggagttgttgaagatgtaacaaacatcattttaaacgttaaaaagttagcgttaaagatttactctgatgaagagaaaacacttgagatcgatgttaaaggtcctggtacagtaacggctgctgacattcaagcagacagcgatatcgaagttctaaatccagatcttcatattgcaacacttgagtcagatgctcatttccgtatgagacttactgctcgcacaggtcgaggttataatcctgccgatgctaacaagcgtgaagaccaaccaattggtgtacttccaattgattcaatctatacgcctgttactcgcgtatcgtattatgtagagaatactcgtgttggtcaaatgacaaattacgataagttaacgttggatgtttggactgacggtagcattgagccagaaaaagctgttgctttaggtgcaaagattctaactgaacacttaaatatcttcgttaacttaacagatgaagctcaaaaagcagagattatggtagaaaaagaagaagaccagaaagaaaaagttctagagatgacgatcgaggaactggatttatctgttcgttcttacaactgcttaaaacgagcaggcatcaatactgtacaagagcttgctaataaaacagaagaagatatgatgaaagttcgtaacttaggccgtaaatctttagaagaagttaaagctaaacttgaagaattaggtttgggtctacgtaaggacgactgattatatctacctgtttaactacttaacaaaggaggggacctcacatgtcttaccgtaaattaggtcgtacaagcgcacaacgcaaggcgcttcttcgtgatttaacaactgatttaatcatcagtgaacgcattgagacaactgaagctcgtgcaaaagaattacgttcaactgttgaaaaaatgattactttaggtaaacgtggagatctacacgctcgtcgtcaagctgcatcttacatccgtaatgaagtagctaacgaagaagctggtcaaagcgctttacaaaaactattcagcgatattgctactcgctacgaagatcgccaaggcggttacactcgtatcttaaaagttggacctcgccgtggtgacggtgctccaatggttatcattgaattagtttaatatttttaatacagatagaaaagggcgagacagtgtgtaactagtcgttgccctttttttatacctaaaaccgggtaaatagcgtaaaaaatcaatgtaggtaatgctgcaatagaaaaagctgagaggaagatagcgttgaaagaaatgtctttagaggtaaaagatttatgctttcgatacgatcctgaagcagacctaacattagatcacctttctctctctgcttataaaggtgaatggttagcgatagctggacataatggatctggtaagtcgacgctggcacgaattctaaatggccttttgctacctgaaaaaggaacggttcgagtgggcgatactcttttatctgaagaaacaatatgggatgtgcgcaagcagattggaatggtgtttcaaaatccagataatcaatttgttggctcaaccgttcaagacgatattgcgtttgggcttgaaaacaacgggattccatttgagattatggaaaaacgtatacctgaagcaatcgaaatggtcaatatgagtgcttttctggatcaagagcctcatcagctatcaggtggacaaaaacagcgtgtggccattgcgggtataattgccgtacagccatctgtcatcattctagatgaagcaacatctatgttagatcctattgggcgaactgaagtacttgaaactgttagaaaattaaaagaagaaaaacaactgacggttatttcaattactcacgatttagatgaagtagcaatggctgacagagtcgttgttatgaacaaagggaagatctatgcaacaggtactccacgcgaagtatttgcattaggttccaagttaacggatattggactagacttgccgttttctgttaaactaagccatcgttttgcttccgtaggaattcctttatcaaaaattcatttaacagatgaggacttggtggacgaactatggacattatattcaaagaagtagagcaccgttatcaagttaatacaccatttgaacgaattgctctacatgacttaaatttaaacattcaatcaggtacatttttggctgttattggccatactggttctgggaaatcaacaatcatacagcatctgaatgccttattgaagccaactgctggtgaaattcaaatcggtgagcgcaccattaaagccaatcgaaaagaaaagaatttaaaagctattcggcagcaagtaggcgtggtgtttcaatttccagaacatcagctttttgaagaaacggtggaaaaagatatagcttttggaccaatgaattatggcgtttcggaagaagaagcaaagcaaaaagcaagagagcttatcaagttagtagggttgccagaagacattctcgccagatctccttttgatttgagtggtggacaaatgcgtcgtgtagcgatagcaggtattctagcgatgaatcctaatgtgctaattttagatgagccaactgctggattagaccctagagggcgtcaagaaattatgaatatgatttatcgtcttcataaagaaaaaggcttgacgacgattctcgtgactcacagcatggaagatgcagctatgtacgcagatgagctaattgtgatgaataagggaacgattgcgatgaaagggtcacctagagaagtatttggtcagcatacgcagttaaaagaatatggattggatgttccagaatcgcttcgctttatgctgaagctgcaagagaaatttcagcttgaagcatcggatacggttattaccttttctgaggtggtagagaaagtgcagcaccttatgcagcaaggtgaacgattatgatgaactcaatcattattggtaagtatgtgccgggtcattcggttgtccatcgaatggatcctcgggccaagctgcttctcgtatttgcgtatgtattaattgtgtttttagcaaataaccctattggctatgcttttttaggtgtatatacccttatgatagtggccatgagtaaagtgcccgtttcgtttattttaagagggttaaagcccgttatgtttattattatcatcacgtttctattgcacatttttatgacaaaggaaggtcctcttttgtttgaatggggatggttttctgtctataaaggcggccttattcaaggtgttttaatttccttgcgcttcttgttcttaattttaattacgacgatgctaactttaacgactacgcctattgaagtaacagatggaatggaaagcttgctgaatccatttaaaaagcttaagcttcccgtacacgaattagctttaatgatgtccatttctcttcgctttattcctacattgatggaagagacagataaaattattaaagcgcagacagcacgaggggtggactttagcagcggccccgttacggatcgtttgaaagctgtcgttcctttacttgttcctctatttataggttcatttaagcgtgctgaagagctggctattgccatggaggcaaggggttataaaggcggagaagggcgtacaaagtatcgtcaattgaaatggggaagcatagatacaattatgcttttacttctgctggcagtagcagttgttttagtgctgattagaacgtaaagattgtttggtgaaaagatgaaacgtttaaaatgtatagttgcatacgatggcacacacttttcaggttatcaagttcagcccaataagcgaactgttcaactggagattgaagccgttttagagaaaatgcataacaaaaaagtgccgatttacgcctctggacgaacggacacaaatgttcatgcacaggggcaagtcattcattttgatacaaacctaaatattccatgtgataagtggaaaaaagcattgaattcaatgctaccagatgatattgtaatgaagaatgtatgtgaagttgatgcacattttcacgcccggtatgacgttacttcaaaagagtatcgctatcatattttgcgcggcgaagatcgaaatcctttcactcgttcttatgcataccattacccttatccattagactactcaaaaatgaaaaaagccatcacatatttactcggtacacacgactttacaagcttttgttcagcgagaacagaagtggaagataagattcgtacgatttacaagattgatatgtatgaagagaatagtcagcttgtgtttagattcgttggaagtggctttctgtataatatggttcgtattcttgttggaacgcttttagaagtaggacaaggccgtattgaaccagatgctataaaagatattctagaaagcaaatcacgtcctcgtgcagggaaaactgcgccttcgcaaggactatatttatggcgcgttttctatgacaactaaacctggtgtaacattttcttgacattagtagcttaaagatataatatatcatatggtatgtattttaaccccacggttagccccggaaattaatcgtgttgaaatagaaggttgaaataattttataattgatgatgaaaattaggagggaaactcatgcgtacaactttcatggcgaaagcaaacgaagtagagcgtaaatggtatgttgtcgatgctgaaggtaaaactttaggtcgtttagcaagtgaagtagcatcaatcttacgcggtaaacataaaccaacttttacaccacatgttgatactggtgatcacgtgatccttatcaatgcgtcaaaaatcgaactaacaggtaagaaattaactgataaaatttattaccgtcacagcatgcacccaggtggtttgaaacaacgtacagcattagaaatgcgtactaactactctgagaaaatgcttgaattaggaatcaaaggcatgcttccaaaaggtagcctaggccgtcaaatgttcaaaaaattacatgtgtatgctggtgaagcacatccacatgaagcacaaaaaccagaagtttacgaacttcgcggataattaataagaggaggttattatcttggcacaggtacaatattacggaactggtcgtcgtaaaagctctgttgctcgtgtacgtttagtaccaggtaacggtcgcgtaacaatcaacggtcgtgaaatcgaagaatacattccatttgctgcactacgtgaagtagtaaaacaaccacttgctttaactgaaactgtaggtaactatgacgtatttgtaaacgttaatggtggaggttatgcaggtcaagctggcgctattcgtcacggaatctctcgtgctttattagaagcagaccctgaataccgtggaacattaaaacgtgctggtctattaactcgtgacgctcgtgcgaaagaacgtaaaaaatacggtcttaaaggcgctcgtcgtgcaccacaattctcaaaacgttaattttatattacgtttcaagccttggtctttggaccgaggctttttttatttgttgtttgcgtatgagacgaaggcttgtgcagacaatatgtaaaaaagggaggcgttatggtgaacgaggttacatatttaaaagaaaaacgttatgaaaaagaaatgaaatatgaacgcaaagtcctaagagaactgtcgtttgatttgcttcaagagaggctgcgtcgttattttcatcccatgtttcagtggaatatgctaggagacgaacatgtggaggagtactgtcttgatattgccatcgaatcatttttattaggtgcccgggtgagtaaacgtggtaaaggctacgaagactttcagaagcacagtaagcaagaagagtctcttttaattgatacattgtacggagccgtcagcatgtctgtaacagatctttatcaagacggtctgtattatttgtgtcaaggatatgtgcaagactggtggaaagaaggttatcgtaccgcagaaaaaagacgtcggttacgtttgcattaaaaagtactcataattcccgttcttgtcccatatagaaataaataggtgaggcaagaagggaagggataaaatgtctaaagtaaaaataatgagcacaattatagcgcttctcgttctttttgtcattgtacaatatcagatagatcatagaacatcatccggttcgctttcactccctcttagcgggaaagttattgtactagatcctggacatggcggtgttgatggaggagccgtaggagaggatgaagtgcttgaaaaagaaataactcttaaaatttcgttgatgcttcgggactatctgcaagagcaaggagcacttgttattatgacgagagaaaaagacgaagacctagcggccaaagacacaagaggatacagtcgcagaaaagtagaggacttaaaaaatcgcttaacgatgattaataaatccaatgctgatttgtacttaagtattcacttgaatgctattccatcctctgcatggagaggggctcaaactttctattacgggtccctaaaagaaaacgagcaagtggctaaactcattcaacaagagttaagaaataatctggataatacgagtcgtgaagcaaaagctattcaaactctttaccttcttaagcattctaagccaccaggtgctctggttgaagtaggattcttatcaaatcctacagaacgtaaaatgcttcaatcgaaacgctatcaaaaaaagttagctgaatccatttatgaaggagtcagccggtattttactggagaaaagcctaaataaaaagcatagcatccttctattcagaaaaatctaatatgtatgatatacttgatagtataaataaatagattttaacatggtggtgggagtatgctaacggaaaagcaagtaaaagaagtagtaggggaaattacagatccatttttaaataaaaaactatcagaaacagatgcgattaaagaaataacaattaaatctgaaaaacagcatataagcctgaagattgctgttgcaaaaacaggtactagtgaacagctgagccttcaaggcacaattgtagaagaattaaaaaaagcaggtgtacagtcggtcggactgcgatttgttgagtttacgcctgaagaacttcagcagtaccgcgctgagcaaccgaatactggcaacttactaactagtccgaatgcacctgaatttattgctattgccagcggtaaaggaggcgttggtaaatcaacagtctctgttaacttggccgtttctctagctcgtttaggaaagaaagttggtttaattgatgctgacatttatggattcagcgttccagatatgatgggaatcacacagcgtcctgtagtagaaggtgaaaagattattccagttgaccgtttcggagtaaaagttatttccatgggcttctttgtagaagataattcacctgttatctggcgaggacctatgcttggaaaaatgttgacaagcttttttacagaagttgaatggggagaattagattatcttttactagacttacctcccggaacaggtgatgtcgcattagacgttcactctatgcttcctgcttgtaaagaagtgattattacaacaccacatcctacagcggcatttgttgcagctagagcgggtgctatggctttgaaaaccgatcatgaggtaattggtgttgtagaaaatatggcctactttgaaagccagctaacaggggaaaaagagtatgtatttggtaaaggcggaggtccaaaacttgctgaggaacttcagacagagctgttaggacagcttccgttaagtcagcctgactggaatgaagaagattttgcaccttccatttacgatgaatcgcatcgtttaggtaaaatatatggagagattgcaagcaagattgcatttatttgcgaaaatgaaaaagcagcaacaggaaaataacaaaaagcacgcgctgttcgagcgcgtgctttttgctattatacagagagttcaatctgcgccttttttaaatcaaatgcaaggttttgttttaagagagctaaaaatgtttttccagctgtacttacggtgtgagactggtgctttaaaatgccgattgcaggcccctcatgcaagtcatgaatcgttttaaccaccacttgatctggcggaagagttgcgcttatttgtggaacaacggctactcctaagttttcttttacaaaatgctgaagtgtgctaatagtgcctaactggactttagcaggcagttggcctgttcgttcaaagattagctgctcaattttcttttgaacggaagattgcccagctgtaattagcgtttcgtgtattaaatcttttgcaaagattgtttttctttttgttagagcatgattgaatggtagtagcagcacaagtttttccgttagtaatgcctcaaattctatatctctgaacgattctgagacagtgccaatcgcgaaatcaatttcttgattgcgtatatgttgatgaagatgcttttcgtctgcaacgagtaagctaatttctgtgttgggatatctttttttaaataatgagagaatggaaggcagtcgactgcttgctgtaggctctgcagcacctatacggatagtgccagcttcacctgttgaataatcctttaaggtgttatttagatattcatattcctttagtaaaatatttgcccgttcgtaaaagattttacctgcttcagtaagttttatgctttttcctcgttctaaaagcttaaatcctagttcggattccaacttttgaatgtgcagtgtaatagtaggctgagagtactttaaatattcagcggctaattgaaaacttcctaaacgaacaatggtttgaaacgttttaataacgcgaaattccatcgaattccctccttttgctataaaacgattgtgttaatttctaatattttaccataaagctaagaattaaagtttacaattccaataaaaatactaagtattaaaaaatataaagaagttatttaggttttttaataaaaataaatgacataattaaatacgcacctcatatgagatgcgtatttaatcactgctgttgctgttctccgcctgaatcagatccagaggaagaagaaccaccatcgtcgctgctttgtttttgtccaccttgtgtttcttcagcggctttcaaaagaatgtcttgaattttagattgataaagagggctatcaaacgtttcggtcataatcttttgtaaataagtgcgatattctttactctttaaaacagtcagtacttctttttccatagccggatcctttaaaacatcttgaagcattccttgatattcaggatctttcatcagttgtttgatgaccgtcttattttctttttccaaacttttagcaaagctttcagcaaacttcggatcatccatggcttttttccaaaattccacgcctttatctgagactagggtttgagaaattgtatcttttatcgcgttttgatccattaaaatatcttgtctaacagaagggtctttcataattgcctcgactgctttttttccttcatctgtttttaaaatatcaacaaccattttctttgtttgatcataatccataccattgttctcttcatcttgcggtgcacaggctgtagctaaaagcatacacattcctatataaatgaggagcatgagtcgctttttcatagtaatgggctcctttcctaatatgcttacgcttaatatgagataatcaaggttttttattcataaaagagctctagatttttcaaaacgtgattggtacaatttatgaaaaggtacaattttgtaacttatgggggagatggaagtgaatagtcgaaattgggttcgtctatttctaaccacgttagctgtcgggggtataagtacagcttttgttgggtttgcggtgcgctggggggaatacggtcacttatttcaacaaggaaagataggagaaattgttgctgttttaacatggctcgtaggcgtagggtttatttttagtttaattagccaaatggggttttttgcatatttaactattcaccgatttggattaggaatttttaaatctgcatcactttggaagtcggttcaaattgtatttgttttatttgtattatttgacgttgcttattttcgttataagttctttcaacaaccgggagaaggcataggcaagtatattttgttaagcgttttcttgttagcggtggggttgttagtggcgtatgcaaagaaaaagcagacgaataaagaggcctttgtaccagcgctgttttttatgattgttgtaaccacaattgaatggttcccagcgctgcgaacgaacgaagaaagctggctttaccttatgttgtttccacttctaatttgtaatatgtatcaacttcttattttgccgaaacttcttacgcacgcaagaatagcaaaagcagacaaatagcatatttgtctgcttttgctttccatatacagtgcgaataaatcttagcggatatcttttacttgggtttttgaatttgaaattaatgttgaaacacttacgtttgagacttttttattttgtaatgaatgcttgatatatggaatagcctttgctgtttgttgagcggagtcagacgcgtgcagcaagataatatctcccccgtctaaaggctttgtaacattcgatacaatcttttcaactcctggatttgtccagtctttagagtcgatgctccagtgaacaatagtatatcctatatctgctgttaattttaagatgtctttattaaattgcccgttaggaggacgaagaaggtgaacatctttaaggcctagagaatcaaagactttctttgattttgcaagatcctgtctaatctcattaggttttaggcttgtataggaagtatagtcatagcccattgtgccaatttcgtgcccgtctttcttaatgagctctacaacatctggatgacgttcagcccatgaagcagataaaaagaaagtagcatgttcaatatgctgttttttcagttcatttagaataggaatagctctttcgtctccccagctgatgttaaatgtaagagcgatttcggaatttttatcatccgccttataaacagctcgtggaccgttatctgttgaaaacacaggaaagtgaaacgtctgttgagcataaagaaaaaagcttgtaaaaaaagcagcaactacgataagcattgtttgtttgattcttttggctcgaatagtataaaacatattcattttgtcacctcatttaataagtagtacttgtctaatttgtatgcgttttgtctacaattaataacaggtaaggaaaagaacgactgattttattttgatgttttgagaatcaatgtcgcaaaaagcaggtgaatcaatgaaaatttgtttatttaatcaactggagtgtttagagttagaagcactgctcagagaagaaatgaaaagaacaaacgttgcttttcaacaaagtttgaatcatgtagttcttgaacgaaacattcaagagaagtatcaaatccttttaaaaatcttgctaagattcggtgaaaacagggaagtaaataagattttttgataaaatgaaaaaaactttttgaaaagtgttgactttatatagtacagatgttaaattattaaatgtcgctgatgagtgattgggaagcaatcgcaattcatcagaaataaaatattaaaaagttgttgacaaataaaagacaacttgttaatataaaaaagtcgctcaagagcggcggttgaactttgaaaactgaacaaagcgacaaacgtcaacgttaatttttatttttaattgagcaagtcaaacatttcttcggagagtttgatcctggctcaggatgaacgctggcggcgtgcctaatacatgcaagtcgagcgaactgattagaagcttgcttctatgacgttagcggcggacaagatgagatttcccatagcgtaagctagtaagatccctgaaagatgatcaggttgataggtcagaggtggaagcgtggcgacatgtgtagctgactgatactaatcgatcgaggacttaaccaaactttaaaagcgtaagctttactcagcaaactgttacctagttttgagagaacaaaactttttaaaaaagtcttgctttctttatcaaatcatgtataatataatatgtctggtggcgatagcgaagaggtcacacccgttcccataccgaacacggaagttaagctctttagcgccaatggtagttgggactttgtccctgtgagagtaggacgttgccaggctattattattccacagtagctcagtggtagagctatcggctgttaaccgatcggtcgtaggttcgagtcctacctgtggagccaactggcccgttggtcaagcggttaagacaccgccctttcacggcggtaacacgggttcgaatcccgtacgggtcaccatttatttttatctacataatagtggaggattagctcagctgggagagcacctgccttacaagcagggggtcggcggttcgatcccgtcatcctccaccaccgtgccggtgtagctcaactggtagagcaactgacttgtaatcagtaggttgggggttcaagtcctcttgccggcaccatttatatcggaggggtagcgaagtggctaaacgcggcggactgtaaatccgctccttcgggttcggcagttcgaatctgcccccctccaccattttattgggctatcgccaagcggtaaggcaacggattttgattccgtcatgcgttggttcgaatccagctagcccagccatagagagccattagctcagttggtagagcatctgacttttaatcagagggtcgaaggttcgagtccttcatggctcattttaataagcggaagtagttcagtggtagaacaccaccttgccaaggtgggggtcgcgagttcgaacctcgtcttccgctccatttctatataaaaaaagatattggggccttagctcagctgggagagcgcctgccttgcacgcaggaggtcagcggttcgatcccgctaggctccaccatacatataaacgtacaacctttaagcaatttgcttaaaggtttttttatgtagtttttacaaattagaattgtatatatattcaaaaaagtgttgagttgagccatcgctcatttagccgttacaataggagagtagcaacatttgtgatggggggacatattatgaataagctttcaattattggagtaccaatggatttaggtcaaactcgccgaggggtcgatatggggccaagtgcgatacgatatgcaggggttattgaacgcatcgagaatattggatatagtgtagaagataaagggaatattgaaattgccttagctgaacgagtacatagtgatgaaaatacaaacttaaagaatttaaaagctgtagcagatgctagcgagaggcttgctcagaccgtaagtgatgttattacaaataaaaggtttcctttagtgctagggggagatcacagcatcgcgatcggaacactagcaggagtaagtcgtcattataaaaacttgggcgtgatttggtatgatgcacacggagatttgaatacagcagatacgtctccttcaggaaatattcacggtatgccattggcggcaagtataggtataggagacgacgcattgactcgaattggcggttatacacctaaagtcaagcctgaaaatattgtgattatcggagcacgttctttagatgaaggagaaaaagagttaataaaggaaaaagggattaaagtgtatacgatgcatgagatagatcgaatgggtatgacaaaagtaatggaagaaacaattttatatttgcgtgaaaaaacagatggcgttcatctatcactcgatttagatggattggatccacatgatgcacctggagtaggaacgccggtcatcggtggaataagctacagagaaagtcatttagctatggagatgttagcagaatctcagctaatcacttctgctgagtttgtggaagtgaatcctattttagatgaacggaataaaaccgctacagtagctgttgcattaatgggctcacttttaggagagaaattagtataaaacattagtacctaccaaaaggtacatgaaatatatatcaacataaaaaaaaagaagctcttagttcggattcgagagcttctttatatagagaaaaacttttcatattcatttaataaaccatctagctctgaactgactctcactactgttagtgatgataaagggttttctgctgcaagagtgaccatgttatttctgcattcttcaattcgattcaaaaggttctcttttgtatgagtcaagctttccactcctcttattttcatctatactaattacataacctacgtatgatctttttaaacgtatttgacaaatttttgttaaaataattaagcataagtgaaactttatgataaagtacacgtatatatactatcccgcaatgggcggaggtaaccgttacatggatttattattaaaaagaaaaataaaaaaagtaaaaaaaggtgaccaggatgcgtttgctgacatagtagaatatcacaaggataaactttttcacctatgttatcgaatgttaggaaaccgggaagaagcgcaagacgctgcccaagaagcgtttattcgagcctatgtaaatattcatagctatgacacgagtaaaaagttttccacctggttatatcgaattgctacaaatctttgtattgatcgaattcgtaaaaaaaagccagactattatttagatgcagaagtagccgggaccgacgggttaaatatgtactctcaaatagctgccgatcaggccttaccagaggaagaactagagcaagtagaattgcaagaattcattcagtcggaaatattaaagctacctgagaaatatcgaactgtcattgtcctaaaatatatagatgagctgtctttaaaagaaatcagcgatattttagacctgcctcttggtacggtaaagactagaattcacagaggacgtgaagctttaagaaatcgacttcgccacttgtaaggagtgaactaagaatgaaatgtccaaaaatgtatgtaaatctcattcatgagcatttagatggagatattacaaaagaaaatgaactgttattaaaagagcatttgcatcaatgtaaaggttgtcagcagcatatgcatcagttaaaaagaaccattgcatttgtgcaaagcacttctcatatagaattacctatgaactttacagcaggtgttatggctgggttaccacgtgagaagaatcgaattcgaatgaatagatggtttacaaaccacccgattcttagtgcagctgctgtatttgtgctgttaatgtccggcaccgtgttttcagcttgggaaacggatgaagacttttctgtttcaaagcagccgaacttggtcattcacgataaaacagtcgttgtaccaaaaggtgagaccgtcaaaggtgatattactgtgagaaatggcgatattaaaattgaaggaaaagtagatggaaacgttactgttatacatggtgataagtatctagcttctgcaggagaagtgacaggcaatattgaagagttagacaagatttttgactgggtatggtataacgtcaaaactcatgccaaacaagctgttgacttttaatagttgaaacataaaaccgtccgcttatcttgttagagaggaacagtggacggttttatttatataaaaagaaggctacattatataggaacaaggatttaaaaataagatgtaatttacagtgtaattttgttttatggtataataaaacggttatgttatctttattacatatatagaggaagtgagaagatgcctattggagacctgccaatcctctcatatttaggaaaaattgttgatgttctcctggtatggttcgtcatatataaattaattatggtcataagaggtacaaaagcagtacagcttttaaaagggatcacagtgattttagttgttcgctttataagtaacttccttggactaaatacgctgcaatggttaatggaccaagcgttaacgtatgggtttttagctatcattattatcttccagccagagctgcgccgagcgcttgaacaacttgggagaggacgtttgttttcacgcagtaatttgcctgaagaagatgaacgtaccgttacgattgaggcgattataaaagcaacgcattatatggctaaaagacgcataggtgcattgatctcaatcgaaagagagacgggtatgggtgattatattgaaacaggtataccgctcaactctaatatttcttctgaattattaatcaacttatttataccaaatacaccacttcatgatggagcggttattttacagcgggatcaagtagccgctgcagcatgttacttacctttatctgaaagtccttttatttcaaaagaattaggtactcgccatcgtgctgctgtaggaataagtgaagtaacagatagtgtgactgtcattgtatctgaagaaactggaggcatttccgttaccaaaaatggtgaattgtatcgtgaattgacaattgatacattgagagaaatgctagaaaaagaattagtcacaacttctaaagcaacttcttccactcgttggcaatggaggttgaagaagaatggataaattgatgaatcgatcgtgggttatgaaaattatcgcgttgctgttagccttcatgttatatttatctgttaatttagatgatggtgccagttcatcaaataagattctgaaccgaagcagttctgccaacactggagtagaaacattaacagatgttccggttcaagtatcctataatgagaagaacagaattgtaagaggtgttccggatacggttattatgacactggaaggtcctaaaaatattttggctcaaacaaagctacaaaaagattatcaagcttatattgaccttgataatttaagcttagggcagcatagagtcaaggttcagtatcgaaatatctctgataatttaaacgtagtggttaagcctgatattgtaaatgtaacaattgaagaacgcgattcaaaacagttttcagtagaggcaagctatgataaaaacaaggtcaagaatggatatgaagcaggggaagcaaccgttagtccaagagccgtcacggtaacgggcgcatcaagtcaattggctcaagttgcttatgtaaaagctattattgatttagataatgcttcaaaaacagtgacgaaacaagcaactgttgtcgcactagacaagaatttaaataaattgaacgtaacagttcaaccagaaacggtcaatgtaacaatcccagtgagaaatattagtaaaaaagtgccggtcgatgtgattcaagaaggcacgccaggcgacggtgtcaacattacgaagctagagcctaaaacagatacagtaaaaattatcggtccatctgattctttagaaaaaatcgataaaattgataatattccagtcgatgttaccggtattacgaaatctaaagatattaaggtgaatgtccctgttccagacggaatagatagtgtaagtcctaaacaaattaccgttcatgtcgaagtagacaaacaaggtgatgagaaagacgcagaagaaacggatgcaagtgtagctgagactaagtcatttaagaatttaccggtttctttaactggtcaatcctcaaagtacacgtatgaactgctttctcctacttcagtagatgcggatgtaaaaggaccaaaatctgatttagataagttgacgaaaagcggcattagcttgtcagcgaatgtagagaatttatctgccggggagcacacggttcctattataataaatagtcccgactccgttacatcaactctatcgactaaacaggcaaaagttcgtgtaacagcgaaaaaacaatcagggacaaatgatgagcaaacagataaagaaacaagtggaagcacgagcgataaagaaacaaagccagacacgggaactggatcaggaacaaatcctgggacgggaaattcaggtgattcaggtgattcagctgataaaccaagcgaagagactgatacacctgaagacaatacagatacaccaacagatagtacagaaactggtgacgacagtagtaataatcaaagtgatgaaaattctacacccgtagatggacagacagataatacatcaggaaactaaatgttttgacatgaaggagagaaaattaatgggtaagtattttggaacagacggagtacgaggagttgccaatagtgaattaactcctgagcttgcttttaaaattggacgcttaggtggttacgttctaacaaaagattcagagcgaccaaaagtattaatcggacgcgatacacgcgtttctggtcatatgttagaaggagcgcttgttgcaggattgctttcaattggagcagaagttatgcgactaggtgttatttcaactccaggggtagcgtatttaacaaaagcacttggcgcacaagcaggagtcatgatttctgcttcgcataacccagttcaagataacggaattaaattctttggtccagatggatttaaactttcagatgcccaagagaatgaaattgaagcgttaatggatagtgaaacagatcaattaccaagacctgttgggggagacttaggtcaggtaaatgactatttcgaaggtggacaaaaatatcttcaatacttaaaacaaacggttgatgaagacttctcaggtattcatgtggcattagactgtgcgcacggggcaacgtcatcgttagcagcacatttatttgcagatctagatgcagatatctctacaatgggggcatctccaaacggattaaacatcaatgacggtgtaggatctacacatccggaagcattaagtgccttcttaaaagaaaaaggagcggatgttggattagcatttgatggagacggagatcgtttaatcgcaatcgacgaaaaaggcgagattgtagacggtgatcaaattatgttcatttgtgcaaaatacttatatgaacaaggacgtttaaagaaaaacacgcttgtttctaccgttatgagtaacttaggcttctataaagcactagaagctagtgggattgaaagtgcacaaactggtgtaggagaccgttatgtagtagaagaaatgaaagctaatcaatataacctaggtggagaacagtcaggtcatattattttcttagattacaacacaacaggtgacggtatgctttcagctattcagcttgtaaacattatgcaagcaacgaaaaagcctttatcagaattagcagctgaaatgaagaaatatcctcagcttcttgtaaatgtaaaagtaacagataagcatcatgttacagataacgagaaggtaaaagtagttattgaagaagtggaaaaagaaatgaacggtaatggccgagtacttgtacgcccttcaggaacagagccgttagtacgtgtgatggttgaagcacaaacacaagaagaatgtgaaacttatgtaacgcgtatcgtagaagtagtaaaagaagaaatgggcttagagtaattcattaattatatgcataagcggtgacgtttcaagctgcttatgcatatttttatattgttgagaaaaattcttggaaattatctaatgctaaaggctgtttttacagatagtaaagaagataattgacgttttctcacttcttattgtaatattaaatctgttcgtctcttaatttatgtaaaggagtgaacaatctagtttaaaagtgaatacaaagcgcctgaactaagtaaagggacggaaacgacttagttgacgaggaggaggtttatcgaagtatcggcggatgcctcccggttgttgattatcacggccgaaaacttgatgtgaaaaacaatgaggtgacttattggacaaaagcattgagatgataatcattgatgatgaaaagagactctcttttcatacatgaaggaggattttatctatgtgcggaattgtaggatatattggaacagaagattcgaaagaaattttattacgtggtcttgaaaagttagaatatcgtggctatgactcagcgggtattgcagttgttaacaatgaaggcgtacacgtattcaaagaaaaaggccgtattgcagaattgcgtcaggcagtagataacagtgttgtagcaccagcaggtatcggtcatacgcgttgggcaactcatggtgtaccaagccaagaaaatgctcacccgcatcaaagtacatctggacgcttcacacttgtgcataacggtgtaattgaaaactatgctattttgaaacgtgaatatttacaagatgtaacgttcaaaagcgaaacggatacagaagtaatcgttcagttaattgaaaaaatcgcagcagaaggcttagatgtagaagaagcgttccgtaagacagtaagcttgcttcatggttcttatgcactagctcttgttgataacgaagataaaaatacaatctatgtagctaaaaacaaaagcccgcttcttgtaggtgttggtgaaggatttaacgttgtagcgagtgatgctatggcaatgcttcaagtaacagatcagtacgtagaattaatggataaagaaacagtaattgttacaaaagaaggcgtaacaattaaaacgcttgatggtgaagtggtagaaagagccccttatacagcagagcttgatgcaagtgatattgaaaaaggtacgtaccctcactatatgttaaaagaaattgacgagcagcctttagttgttcgtaaaatcattcaagagtatcaaaatgagaacaatgaactgcacattgatgcagacattttagaagcaatggatgaagcagaccgcatctatatcgtagcatgtggaacaagctatcatgcaggcctagtaggtaaacaattcattgaaacgtgggcgaaggttccagtagaagtgcacgtagcaagtgaattctcttacaacatgccgcttttatctgaaaagccattgtttatctttatttctcaaagtggagaaacagctgacagccgtgcagtattagttcaaattaaagaactaggttacaaagcgttaacaatcacaaacgttccgggatcaacattatctcgtgaatctgattatacgttattacttcatgcaggtccggaaattgctgtagcatcaacaaaagcttatacagctcaattagcagtgctatcaattctagcggctgtaacagcaaaaacacgcggcattgaattagaatttgatttagttcaagagttagcaatcgtagcaaacacaatggaagtactttgcgacgacaaagaagaaatggaaagcattgctcttcaattcttagcaacaactcgcaacgcattctttattggacgttctgttgattattatgtaggcttagaaggtgcgttaaaactaaaagaaatctcttacatccaagcagaaggatttgctggaggagagcttaagcacggaacaatcgctttaattgaaaacaatacgccaattattgcattagcaacacaagagcatgtaaacttaagcatccgtggtaacgtaaaagaagtagtagcacgtggagctaatccttgtatcatttcaatgaagggattagaaacagaagaagatcgctacgtgattccgaaagttcatgaaacactttcaccactagcagcggttattcctttacaattaatctcttactacgctgcactgcaccgcgattgcgatgtagataaaccacgtaacttagctaaatcagttactgtagaataataaggttctagacacccttctattatagaagggtgtttttgtatgtctgagaaagagaacaaacaccgtttatgctagaagtttcattgagctaaaaaatatatttgcttgctccatttattttatataatgaaataggtaaaggaacgaacctcagctattaaaaaggaggtggaaagcattagtggattggctcaaagtataaagtacgtgttgcgaggcatcttttttgtcttgtattttcccttttattttgtatttcaaattttgtgtaagctatggatatattttatcgctaagcccctcatatggataggaacaagaattattcaacctgtcattgatttcatttggagatacattatacgtttcttgttcgtttatcctatttcttggctatggagtgtcctcatctatccttttattctcttcgtttggaaacgatgttttttgcctataactagatttatatggaagtatgttttataccctgtgttgtatctagtttgttatccttgttatcttttctggaaatatgttgtgctgccattttacaatgaaattgttattcctgtggtttcattttgtcagcgtatattcctctgtttctggaaaggagttaagcggatcgtaattcatatgatctactatcctttacggtggatttggatgagatgtatatacaaaccgcttaaaaatgtatatacaaaaatcattcagccggttatcaaatggttttctcatttatttagttaatgaaatataccaaaagattgcttgtcttttttaggtattaaactcgaaagataagagggaattgatgtataataaagacggatatatcattgcctatttattttattagattcaattttgaaagagagtgaaacaatatgggccgtaagtggaacaatattaaagaaaagaaagcgtcaaaagatgctaatacaagtcgtatatatgccaagtttggccgtgagatttatgtggctgcgaaacaaggcgagccagatccagaatcaaaccaagcgttaaaagttgtattagaacgcgcgaaaacatacaatgtgccaaaagcaattattgaccgtgcgattgaaaaagcaaaaggcggatcagaagaaaattacgataatcttcgttacgaaggttttggaccaaatggctcaatggttatcgtagatgctcttacgaataacgtaaacagaacagcttcagacgtgcgtgctgcctttggtaaaaacggcggtaatatgggagtaagcggatcagtagcgtacatgtttgatccaacagctgttattggtgtagaaggtaaggatgaagaagagacgctagaactgttaatggaagcagatgtagacgtgcgtgacattttagaggaagaagattctgtaattgtttatgctgatccggatcaattccatgcggtacaaaaagcgttcaacgatgctggtattacggaatttacagtagctgagcaaacgatgcttgctcaaaatgatgtaactcttcctgaagatgcacaagctcagtttgaaaaaatgattgatgcattagaggacctagaagatgtgcagcaagtatatcacaacgttgatttaggataatagtgaaagaggcagacctatcaaagaggtctgtctttttttataggccgtgtgaaaagcatctattgaccctttcccttcttttggaatatggtaagataatgaattaagaatagaaaatagtagaattttataagagataaatggagggaaagcagttgaaaaaattaatggtggggatggcgttaacagctacacttgcaacggctgtaacgcctggctttggctcaatcgggggaaatcaagaaaaggcatatgcagcgacggttacatataaagtgacggcaagcaagctaaatgtgagaagcggagcgggaacgacttacgggattatcggcagcgtagtgaaaggtcaagcgctatctgtgatgagcaaaagcggaagctggtacaaaattaactataacggccgcatgggctacgtaagcagcgattatgtacaagcatcaggaacaacaactccaccagcagaaagcacaacgtacacagtaacggcaagcatgctgaatgtaagaagcggagcaggcaccaattatgcatccataggaagcgtgacaaaaggccagaagctgtctgtggtgagcaaaagcggaagctggtacaaaattaactataacggccgcatgggctacgtaagcagcgattatgtacaagcatcaggaacaacaactctaccagcagaaagcacaacgtacacagtaacggcaagcatgctgaacgtaagaagcggagcgggcaccaattatgcatccataggaagtgtgacaaaaggccagaagctgtctgtggtgagcaaaagcggaagctggtacaagattaactataacggccgcacaggctatgtaagcagtgactatgtacaggcttcagctacagcgtctccaaagctcgtagtggattcttttaaaacgttaggtaacgctcagcaagtcatcttggttacagcagataactacgatacgaagtctgctaaaattcaaacgtttgaaaaagttgatgggaaatggaagcaagttttaactgcgaacggtgtacttggacaaaaaggattcgctttatcgaaaaaagaaggagatatggaatctccgacagggaaatatacaattggcacagcattcggacgctatgcaaaccctggaactaagcttccatatcgaaagattacagcaaatgatgtgtgggtagacgattcaaaaagctctctatataatacgtggcagcaaaagccggctaatggccgctggacgagcgctgagaacatggacatcccggcttacgactatgggtttgtcattaattataacgaatctagaacgccaggaaagggaagtgcaatcttcttccatgtaggaacaaattataccgcaggatgtacggctacttctaaagaacaagttgtctctattttaaaatggttaaatccagagaaaaatccggttattattcaatctcctgtaagtgaattagataaatattaagttagaaagcagctgaacttttaaagttcagctgcttttttatgtaattaaaagctttgtctgtctgtggtacgacaaagttagttttcctatttattgaatgaaagcgtttaatctcttacgattaaagtatcatcacgtagagaaaggaagagagcaaatggctcaatctaatataaaagtagctgtacaaaagtttgggaactttctaagttcaatggttatgccaaatatcggagcatttattgcatggggacttattactgctttatttattccaacaggcttttttccaaatgaaaaccttgccaaactagtggatccaatggtcaagtatttgcttccgttgctaatcggctacacaggaggaaagcttgtccacgatcagcgaggaggcgttgtaggtgctatcgccaccatgggcgtcatcgttgggtctgatattccgatgtttctaggcgctatgattatggggccgcttggcggttatatcatcaagaagtttgatcagtttattgaaggtaaagtcaaaacaggatttgagatgttaattaataatttctcagcaggtattcttggaggaattctagcaattctagcctttttaggagttagtccagccgtggacggatttacaggcgcgcttgtagtgggtgtagattggatggttgcacatggccttcttccacttacaagtattctaattgaaccagctaaaattttattcttaaacaatgctattaatcacggtatcttatctccgatcggagcagaacaaattcgaacaaatggacagtccattctattgttattagaaacaaaccctggtccggggttaggaattctgttagcgtattgcttctttggaaaaggaacagcaaaacagtcagcgccgggagcggccatcattcattttattggcggaattcacgaaatttacttcccttacgttttaatgcgtccgcttctaatcattgcggctattttaggcggaatgagcggcgtatttacatttgttcttttaggcggaggcttacaagcggttgcttcaccaggaagtattttggctattttagctgctacaccaggtaatgcaggcagctatgttgcaaatatctccggtgttctcgttgcagccatcgtatcgtttattgtaggttcgttaattttaaaaacgggcaagcaaacagaagatttggatgaagcagctcgcaaaatgcaagagatgaaaggcaagaagagctctgtagcaggaagctttacaaaacagcaaggagaagtaccagcaagcgttcagaaaattgtttttgcctgtgacgcaggtatgggatcgagtgcgatgggcgcctctcttcttcgcaagaaagttaaacaagcaaatttaaatatttcggtaacgaatacagccatcagcaatattccaagtgaggctcaaatcgttattacacagaaagagctgacgccaagagctcaaaataaagttccagatgcgtatcatatctcggttgataattttctatctagtccggaatatgacaaactaattgatcaactaaaaaatgatcatactacttctaaagcggaagaagaaaaaaaagtatctgcagaaaataatacagatagtaatgatggtttattaaaagaagaaaacgttttcttgaatcagcacttttcttctaaggaagaagcaattcgatttgcaggaagtgtgttagtaaaaggcggatatgtagaagaaaactacgttgaagcgatgattgagcgcgacaatatgacttctacttatatgggaaatgacgtggcgattccgcacggtacggaagaagcgaaaaagaacgttttaagatccggttttacagtgattcaagtgccagaaggcgttgattttgatggtgagaaagttcgtttgatttttggaattgccggaaaagacggcacccatttagaaattttatctggtatcgcgattacatgttctgatatggacaatattgaaaagatggttcatgccaaatcagctaaagaattaatgactattattcaacgtaactaacgggatagaaaggcatgaagatgcctttttatcctttgtttataaataagaaaagagttgatgttcttgtttattacttcaagagaaaaatcaatcattgagttaattattaaaacggcaggaaaacatacagcccttacacttgctacttttttgaatgtaagtgtaagaactgttcaccgagatttgaaggcaattgaatcaatacttgaaaaatttgatttgaagctgattcgtacacaagatgaaggactaatgattgaaggtaaaaatgaacaaatttttcgccttattcaagagctgatgaagattaaaacgacggatcagtctccacaggaaagaaaattaattcttttaattcttcttctagaagaaggggattcatttaaattacaaacgctggctaaagacttagaagtaagtatcactacactaactgcttatttagatgaattaacagagtggttaaccacatttgacgttctccttcatcgaaagagaggggtgggagtagaggttcaagctactgaagccaataaacgaaaagcattagctaattattttcttgttcactttaatgaagagttaattgagtgcttgtttttagcagaaaatcagcagcatacggatgaaacgattttgcactatttttatccggattatttggcagaagtagacagaattatacatcaagcgattaatcagcatcattctaagctggctgacagcgattatatagggctcattgttcatatttgcattatgatacagcgaacgaaaaagcaaatgtatctagaagacgacggcggccaaatggaagaactggcgagtgaaatgtttttaatgaaggatatttgccgcgaaattgaacggatattttctctttcttttacagaaaaagatattcatttcttagcagtgcggctgcgtgcagcaaagttccaaactactagagacgtatattacgacagcgtagtggttgggcagattattaagaatatgattgctcacgtttctgttcagcttaacaccgacttaactggtgatttttccctttaccaagggctgcttgctcatatggaaccggccatttttcgtcttaagcaaaaaatggagctttttaatccattaacagaagagattaagaaaaagtaccctgttttatttatggctgtgagaaacagtatcgatcaagagctaccggatttagtttttccagatgatgaagtagcatatcttgttttgcattttggttcaacgctagtgctaaaagaagaagtcatggaaattcaggcgctgattgtctgtccaactggaattggcacctcgaaaatgttagctagccgtattcgtaaagagattccggagattaattcagttgtcattaaatcggtaaaagaaatcaaagaagccgcgcttgaagggtatgacgtagtgatttcaacagtaaggctgccttttttaaatgtcgattacattttagtcaatccactcttaacggaagaggatattcaatccgtccagaattttttacagaaaaacattcaaaagttaaccaaagataaggactaccgttcgttccaatataaaaataagaccgcttctacagaaaaaccgtcttttgaggaaacgatgaagcaaattaaagatgtgcatggaagtatcgaatcaattcttcaaaaccttaggatgtatcgattttcggatgaagtgagtcacgatcaagtgatttcgcacgtagtacgcgctgctgaaaaagaacgtttaataaccaatgccagctgcgttattcatcagcttaaggaacgagaaaacaaaggcggtttaggcattccgcaaacgagtatggcactgttccattgccgtgaacatcacgtgaaagagctgatttttcaagtttcacatttagaacagccttgcacagttaaaggtatggacggaacaaacatgcaggcgcgtaaccttctattaatgctcgcacctgaagagttaagtgaagcacagcaagaaattttaagtttaattagtaccagtttaattgaagatcatgaagcaatgatgattttttcgtcttcgaacgaagagataattcgcaaaaagctagaggatacgtttcatgagtaccttcgaaataatttgataaaggaatgatttttgtgaagcaagcagttcattttggagcaggcaatattggtcgaggattcattggggcattgttttctcaaagcaactatcacgtcacattcgtagatattgctgaaaaggttattaatcagttaaacgcagataaagggtataacgtaataacagccgcagagcatcccgagacattagctgttcaaaacgtatctggtttaaataatctgacacaagaacaagcggtcattaaagcgattaaagaagcaacgtacattacgacggccatcggaccgaacgttctgccgcgaattgctcctttaattgctaaaggtttggctgaacgtgtaaaagcaagcgacgaaaatgtatatattattgcatgtgaaaatcaaatctctgcaacagatttattaaaaggctatatttttgacgcactggatgaagagacaaaagctcatatgataaataaggtctttttcttcaattcagctgtagatcgtatcgtgcctattcaacatgaccaaggttcgcttgatgttttagtagaatcctattatgaatgggtagtagaggcacctgaagatattccgtttgtagaaggaatgacgattgtgcctgaccttgctccttttattgaaagaaagttatttacagtgaatacgggacacgcggtaattgcatattttggttatttaaaaggaaaagaaacaattgatcaaacgttaagagattcagatatttatgaacaagtacagcaaacgctacaagaaacaggaaactatctaattaaaagatatgacttagatagagaggaacatgaagcctatattactaaaatcattgagcgctttaaaaatcctcatttaaatgattcagttaaaagggtaggaagagcgccaattcgcaagcttggacctcaagatcgtttgattcgtccagcgctagaagcaaaaaaagcgggcctttcttatacctacttagcaaaggctatcgccgctgcgcttttatttgacccgcaagaagataaagaggctatgaagcttcaagcgaatattcatgagtatgatattgagtatgtattaaaagagattagtgggttagaggcaagtaatgatttaacaaaagaaatcattgctcaatataatgctttaaaatcgtaaatgaatttagtgcgtgtaaacagtccattttaaatgggctgtttttcttttagcagaaagggaatgtttgtgtataggagggtgataaaatggtagctattacgcacgttggattagctgtacctgatgtagaagaagccgtgcagtggtatggaaaagttttaggttttaagctgatttccggtccttatacgtttaatgcggaggaagaaaaagctgaaaatatgactcaagatttactggggtctcatatcaaaaaaatgaaaaatgctcacatgacagctgacaaccaggtaggcattgaactgtttgaatttaataagccgcaaaggcctcttgtattaaaagacagcgatgagcagtatcaaagttattttcacatgtgtttaatagccgaggacgtggaaaagttagcggataaaatcgaacaatcaggtggtaaaaagcgaagccaagtatggaatacaagacctggaaaaccttattacttggtttattgtgaagatccgtttgggaatattattgagctatattcacacagtacggagctcatgtatgggaatagagaaggataaaagcttatccagatttcttggataagcttttattttttcatagctgtccgtagccgtatacttttgccagctcttcaaaggttttggatgaatacgtaatagttacagatgttcctactgccactttattgaataattcttccacatccgcattatgcattcgtacgcagccgtggcttacatatttgccgatgctatcttctgagttattgccgtgaatagcgtatgtgtcgccggttgtgccgtttgcattaagccctagccagcgagagccaagaggattattagaagcgcctcctgcaatatgccctgtatagtaagggcgatttttaattttgttaacaatcttgaaaaagcctaccggcgtatcgctccatgtttttcccgtagctactgaatacgtcttttctaactttccattatgaaaataagcaagctgatttgtttttttattaataattaaatctccacttgctgcgttttcacttgcattcgccgcacttgctgtataagaaatgctgataatagctgcgaggcataaagcagctgcttgcagtataatttttctcacgttctagccatctcctctattgttcgtttacatatttaatgaattacatgctattagtgtataaaaggaaaatggactgaatatgaatctttcctgaatgaaaactgaaagtgcattttatttataagcgaatataaagtaaaaatctgggcagaaatacaactaaaggtctggtatatatctcataaaaaagaaaaaaatgaaaatgcaccttgtctgtttaatttaggatgtattatcatgaaagtttgaaatgaagggcaggaggtgaaagaaacagatgcttaaagaatttaaagagtttgctttacgtggaaacgtattagatttagctgtcggggttattattggagcggcatttggaaaaattgtcacgtctcttgtaaatgatattattatgccgctgattggtttgttgttagcagggatagactttaaagatttatccttcacagttggaaaagctacggtattatatggatcttttattcaaacaattgttgatttcttaattgtcgcattctcgattttcttatttattcgtttctttaatcgttttaagagaaaagaagaagagaaagtagaggaagaagtggctgttctgtcaaaagaagaagagatcttaacagaaattcgtgatttgctaaaagcagaagcagtgaaagagcgttcataacagcaatttttacatacgtataaaacggctaagaggcccgtctttttataagaaaagcgggctttttttgtgtggaatttctcgggaaatgttagtggtatgattatgggaaaattaggcgtgaaagcgagagagataggaatgttaaaattatattaaaagtgttaagatattgtaaataggaggcttaaggttatgtttaaacatttgtatcgttctttgccaatgctggcagcgtatggtctgcttagcgtttttttatacagtgttgttatgtttaatgtatcaaatgacacaaaaatattgtttgactgggcccaaatccatacagctgggttcgtagtattaatagggggatgctcatttatcttatgggcgctcactttctatttgctacttcaatttaatcagatagagagaatacaaggttcgcagtggtatgccatttttacggcaattgtgttttcaattgccgtagcagccgtttctgctatggtttttgttatctatcatattgatatacataatccaggcaaaacaatagagtggatgcaagtatatcccgaacgctatctttttacggtatttttactttcgctgttaacactagcgatcattatgctagtaggggaagcttatttaggagctggaattacctttgttctgtattttattttagctcttgtaaactattataaaaaaatctttcgaaatgaaccgttgttcccgaacgattttattcaggccagtcagttaaaagaagttattccaatgattaaagattcgatttcaattcccattgtaataggagttattggatctattatcgtactgatcgctctttggtttttcttgccgaaaattaaaattcgatggtttcttcgaattattatgattctgccgctcatctttttaatgaaatcatttttattctttgaacactcgtttgctcaaaaatattatgatcaatatgctgcgctgatgccgtggaatcagcaaaataattattactataatggacctgttattggcatgatttcaaatattaaaacagatgtactccaagagccagatgactactcagaagaagctatggcgaaagtagcaaagcgcattcagtcaaaggaagagaaaacacaagaaagcaaggctgaagtcaaaccaaacgtcgtgtttgtgatgaacgaaacgttttgggatccaacaaagcttaacgtgacattctctgaagatccaatgaaaaatacaagagaacttcaaaagaaatatccttccgggtggtctttaagtccttcatttggcggagagacagctaatgtggagtttgaagcgctgacgagctactctttgtctttctttaaccctggaggccttccttatcagcatgtattgagtaaaaaagaatatccatcttttgtctcttatttagaaaaacaaggctatgctacaacagctatgcatccaaacagcggtatgctttatatgaggcaaaatgtgtacccaaatttgggatttgatcaagtgaagtttattgatcaaatgaagcatacgcaaaaagataacaaagaattcgtttccgatgaagcggtagttgatgaagtgctcgatacgcttcgtcagtcgaaaaagcctgcatttgtgcatgctgtaacgattgcaaatcatcttccttattcagcggataagtataatggtcaggaaaccattaaagtaaccggtaaagggttatcaccggaaatgcaaaaggaaattgaaatttatgctgaaggaattaaacgttcagatgctgctttaaaacgattgaacgatgaaattcaaaagctggacgagccgaccattgtagtattttggggagatcatttgccagcacttggacaaaaccttcaagcttacaaagaaacgggttttggaaacgagaaaacgcagcaaacatctcaaaaattttatgagacaccgctcttatttttatctaattacgatacgaaaatagataaaaatctcggtacgatgagtcctatttatattgctccgacgcttgctcaatctcttggttacaaaagtaatctgttctacgatcagttgaatcaaatgaaaacagaagtgccggcttttcgttcaaatatgtatatagattcaaaaggaaagctagtggatgatccggcagcgctatctaaaaaagctgcaaaagaccttcaagattaccatgaagttgagtttgatacattatccgggaaacagtacgaaacgcataagttgtataaatgaaaataaaaactccttttaaataaaaggagtttttattttttaagtgtttaaggttgtactaaaaaataattcatgtataatattttaaggttaaaagtaaactttaagttaagtaaaacaaaacttgagcttggaacagcatgaacaatcattcatgctgtttgctaattttaaatacagttgaggatcgagagtatggaaataggaaagaaaattaaaaatttacgattaaaaaaaggtttaacacaagaagagctaggagaacgtactgatttaagcaaaggctatatttcacagctagagcgcgatttaagttcgccgtctttagaaacattttttagtattttggaagtgctaggatgcgaaccgaaagaattctttgaaattgatacgcatgttcaaaaggttgtatacagagaggaagactacacgagttattgcgaagatgaaaaaggttaccatattcagtggcttgtgcatgagtcaaatgaaaaagaaatggagccaattcgtcttattcttcatgaaaaaggtgcatttaagagatttgagccttctctttcagaaacgtttggctatattttgcgcgggtgtgtgaaggtgaagcttggaggcagaatatatgaagccaaacaaggagaaaccatttattttcaagcttctgaagaacatcagattttaaatgctcatgacggaataacagagttaattattgtggcgacagagtcttatttatagaacaaaagaggtgaagtgaaatgacatctacgaatacaattattcaatttgaaaatgtgaccaagcaatatgataatgattcagttgtattggatcatgtaagctttgaaattgaaaaagggaagttttataccctcttaggtccatcgggatgtggaaagacaacgattttacgattaattgcaggctttacggaagcctcaagcggaacgatttattttaatgggaaaagaattaatgatgtcccggctaacaaacgtcaggttaatacggtttttcaagactacgcgcttttcccccatttgaatgtgtttgaaaatgtagcatttggtcttcgaatcaagaagatgaaaaatgctgatattacaataaaagttaaagaagcccttcgttttgttaacttagaaggatatgaaaacagagaaatgaaggaaatgtcgggcggccaaagacagcgcgtagccattgcacgagcaattgtaaatcagcctgaagttattttgctggacgagccgctttcagctcttgatctaaaattgcgtacggaaatgcaatacgagttaagagaattacagcgccgtctaggtattacgttcatttttgttacgcacgatcaagaagaagcgcttgcgatgtccgatgaaatctttgttttaaataaaggaagaattcagcagagcggggaacctacagatatttatgatgagccaatcaatcgttttgttgctgattttattggtgaatcaaatattgtgccaggtaaaatgattgctgacttcttagtggagtttggcggccagcaatttgaatgtgtcgatcaagggttaaaccaaaatgagcaggttgaaattgtgattcgacctgaagatttagccattacaagctccgatcaagggaagctgcaggttcgtgtagattcacagctgttcagaggagtccattatgaaattttaggctatgaccatgcagggaatgagtggctcgttcactctacgaaaaaggcaacggttggcgaagaaattggtttatatttcgaacctgaagctattcatgttatgcgatttaatgaaacggaagaagaattcgataagcgactcgaaggttatgaagaggattaccatgcaaactaaatcaagaaatatttacttagtcccgtacgtgttatggattttgctttttgtagttgctcccattgtattagttgtctattattctttttttagcattgataatgagctgacgcttgaaaactataagaaattttttacccctgtttatttacagatgacgctgagctcattttggtatgcctttttaattacgttattttccttggttttttcttatcccacagcttatttactaacgaagcttaagcataagcagctttggcttttactgattattttaccgacgtggattaacctattattaaaagcttatgcttttttaggtatatttggcacgtacggtacggttaataaatttactgaatttctgggacttggcactcatcaaattttatttactgactttagttttgtatttgtatcggtgtatatttttatcccctttatgattttgccgatttttaactctttagaagaacttaatccctcgcttatctacgcttctcgagacttgggagcatcttcatgggtgacatttaagcgcgtggtatttccgctaacgctagaaggggttaaatcaggttgtcaggctgtttttattccagcactatcactctttatgattacgcgtttaattgctggaaaccgcgttattacactgggaacggcgattgaacaacattttttagtgacgcaggattggggcatgggagctacaattgccgtctttttaattattgcgatggccgttatgatgctcataacgggcactggaaagagaggggtgtaaagtgaagagaaagtggaagttcagccacctttatttattttttgtctttttcattttatacgcgcccattttctatttaatgtattactcttttaacagcggaggaaacatgcgagaatttgaagggtttacgttagattggtacaaagaagtgtttcaagacacacgtttgctcattattgtcttgaataccttaattattgctctattgtcttcggttatttcaacgattattggcgtgataggagcacttgctatcgtatacgtgaagcgtagacgtgttcaaaatacgctgttaacatttaataatgtgttaattgtgagtccagatgttattattggcgcatcttttttaattctatttaccattatcggtgtaaagctcggatttatatcggtattattagcacatattgcattcagtgtaccgattgtggtcatcatggttctgcctaagctgcaggaaatgagtccgacactgctcgatgcagcccgtgatttgggagcaagccgctttgaagtactttcgaaagtggtattgccatttattcgtcctggtatctttgcaggcttttttatggctttaacttactctttggatgactttgccgttactttctttgtgaccgggaacggtttttccacgctttcagtagaaatttactcgttagcaagaagaggggtctcgctgaaaatcaatgctctttctactcttattttcatgtttaccgtgctgattgtgattggttattactttatcagtcagcgatatagcaataaagtgaaaggggtggcgactggaaaatgaagcaattagcaaagccgtttatcttcatcgtcatcctttctttcgttcttatgtatgtggttcatcatttgaacaatgccgaaggatactctggaggagatacgctgactgtctataattggggagattatattgatcctgatttagtgaatcagtttgaaaaagaaaccggaattaaagtcatttatcagacctttgattcgaatgaagcaatgatgaccaaaattgaacaaggtggtacaacatttgatattgctgtgccttctgagtacgcgattagcaagatgcgtgaagaaaatttactattgccaattgatcattcgaagctgcctaatttaaaatacattaatccgcgttttttagacttatcctttgatcctggcaataagtactctattccttatttttggggaactgtgggtattgtgtataactctaatatgattcatggcaagaagataaaaagttggaatgatttatgggatcctaagctgaaaaataaaattttacttgcagatggcgctagagaagtgatgggaatggggctaaacagcttaaattattcattaaatgatacgaataaagcccatcttcaagaagcaaaaagaaagcttgatacattaacaccaaatgttaaagccattgtaggagacgagattaagatgctcctagcaaatgaagaagcggcagttggcgttgtttggtcaggtgatgcttctgaaattatgagtgaaaacgataagctgaattacgttgttccagaagaaggttcgaatttatggttcgataacatggttattccaaaaacggctaaaaacgtagaaggtgcacataaattcatgaattttatgctagatcctaaacacgctgctcaaaatgcagaatatgtagggtattctacacctaatgaaaaagcgctagattatttgccgaaagaagtagcggaagatgaacgtttttatccggatgaagaactaaccaataagcttgaagtatataataacttaggcaaacgaatgcttgcttattataatgagttatttttagaatttaaaatgcaccgtaaataaaaggcacttaattaggcctttatactcaagttctttattgtttttgtaaattcagttgcgtgatagcaagaggaaagataaaatacaaacgagtaaagctaataacatttattttatgttattagcttttttatttgtaaaacgggaaagataagaaaaaattgaatgttctattattcatctagaatttatatttcacattatataggagagaaaaagtgaagcaaaaacaaaagcagcatattcaatccatttattttttacgattattcgctatgatgatggttgtgctcgtacatgtaacagcagcttatgcaacggtactgccatttgcaagcgaagcttatcagaaatatcatttccttaaccgaattgttcgaattgaagcagggatcttcattgtgatcacaggtttagttttcttttatagttatattaacaagccgttaacaaagactttatggaaaacgtattatgctcgaagagtgacatatattttagttccctatgttatttgggcacttatttatgaattttattcgtactatgtgggagcaacagaattaaatgcagctgatattgtgaaacgtattttacgcggagagtcttactatcagcttcattttatctttttaattgtacaagtgtatctcgtgctgccgatttttgtatggctagcacaaaaagtaaccatttttaaaaaatacatgtggctgtttggtattatcattcagcttggttatttaatgcttaacaataagtatcatatcacttcatttaatttatttttaaatacgatggctacgtttttactcggcggttggattggtgtttattatcgcgaacaagtggataaaaagtatagtcgttcaaatattgtattatttctggtgacgctcggatcgggaatagctatttcactgttaaattatcacttatacacaatgaagacaattcaaatttcaggctttacgtatgaggctgttaatacaatttatttggtggtgggaagttatttcttcttccgaattgcagagatattagctgaaaagctttctatgaagtccgtgacggttgttaaaaatattgccatgtactcgtttggattttacttgattcatccaatggttttaaactttgtggcaaaagcagtaccaatacaaggaaactacatgtttcactttgaaatcttggcacgctatattctaacattagcgggctgttacctcatcatttggggatgtcatcgtcttttaccgtttgctagctttttgtttggtaaactgccaaaagaagcggtgttcatttaccgacgtcctgatcataaatagcgtttagttaaaagttatgcctgcttgcaggcataactttttttataaagtataagagatgataacacgctagttttaaaatatttttaaaagtgacatgctaagataatgcttacttaggtactcacaaaagggggaatttgatatgcgtgtacttgtggtagaagatgatgcttcattattacacggtatcgtagaaggcttaaaagaagaaggatatgaagtggattgtgcgtctgaaggagatgaaggtttgtttttagcagagcagaatatttatgatgccttgattttagatattatgctgccgggtatgacagggcttgacatactaaaaaagctaagaaaacaaaaggtgctgacgaaagttatttttcttactgcaaaagatagtgtagaagatcgagtgaaaggacttgattatggagctgatgattatttggttaagccttttgccatggctgaactttttgcaaggttaagagtgatgctcagagacttgcaggcagaagaaggcatgatttcatatggtcccatttctatacgagaagccaatcatgaagttataataaatgggagtgccctaacgttaacgattaaagaatttcagcttttggaatactttattcgaaataaagaacaaatccttattcgagatcaaatttttaatcgggtatgggggtttacatctgacgtaggagtgggtgtagtagatgtctatgttcaccatttaagaaagaagcttcagccttttaattgtgacggttatgtacgtacagtgagaggcgtaggctttatgttaaaaggggaagagcatgtttaaaaagacgagaatcaggcttgtgttatttaacacaatggtgctgatggttattttgagcatttttagtgtagttttgtatttttacatgcagcatcttatttttttaaacccggacaatcggctaagtgagatgagcgagcaggttaaaaaaagaaacttacatgagatccaagaaaacaatgagagagaaacagaacggcgcgttgcgtttttactttggagcagtgataaaaaactaatcaaaattacacctaaaaaagggttatatacaaacgatattgacgactttaagcctgcactctcagaaggaaaaatccaaacgtcgcaagaagtaaacggtcatgcttatcgagtgatgaatgtgaaaaacgaaggatatataaaagatcaagacgtttcaacaattcaacttgtcttaaacgtagatccagaaactcaaaccttagagcaccttgcttttcttcttatcatttcagcttttattggactgcttctttcgcttgtagctggcttgtttttagccaatcgagcgcttgtgcctatccaaaagtcttggaacaaacaggtcgaatttattgcagatgcttcccatgagttaaggacgcctctttccgtgatgcaaacgcatctcgagctattgtttagacgaccaaatcatacgattgagcaagaaagcgaaaatatttatcaaagcttaaacgaagtgaaacggatgacgaagctggttggcaacttactaacactggctagatctgattcaagtgcacagctgctaaacaaaacggtctttaatatgggtgagctcgttgataaagtagctaatcagtttgagcctatatttgaactaaaagagctgcacttcacaagggaaattgaatcgttaatgtgtggaggagatcaagaacgacttcatcagctatgtatgattttattagacaacgcttttaagtacaccccacctggagaaagtattcatattagtctaaagaaacatcaccactctatgatgctaattgtcaaagacacaggcattggaattgaagcgaaagatcttccgtatgtgtttgatcgtttttatcgaagtgataagaaccgagcccgtgccgaaggagggtcaggattaggtctggcgattgccaaatggattgtacaagcccataacggagaaattaaggtttttagtcaaaaaaacgtgggtacggaattttatgtgaaaattccgctatgaaaaaagctgcctgtcattaggcagcttttttcatcacttttttgtttgcagccttccatgctttccatgcattagcaagtaacaggccaattaataaataggcgaggccgccaaaaactaagtaatctacggcgctaattgcccccgcaagcagcccaaatttaatttggtctttatacttcgcaggagaagttggcggatccgtcaccataaagaaggctaaaaataaagcagaattgacaaaaggagctcttaaagcatccgctacatcacctactcctattaatgacataatcgcaaaaatagcaaaatacacgcctaaaaacgcaaatacttgagggaatttatttactttgcttgtcacaaggtaccctgtcacaaacacgaatacaatgagccagacgggtagtaaagataagcttccccaccagctttggccgcttgaaaagacaataagcgaaaagagaagaccaaaagcggcagggttaaaaataggcttcttttttacttttactaagtgcttggataaaatcgctacagctacggtgcaaaatgtgaccgaaggcggtgtagatgtgctaagcactaaggcaataattaatccagtaatgatcccgccgtcagggagctgaattttctttttataagcaaaagaaaatcctaaatctaaggcggccgccgagcatatggcaagcagtaggtgtcctaatccttgaaaggcagaagagttgaattcacctaataaggttaaaagcagcagcatagccatcacgtatcttttaggtgttttaactagctgcgcccaccgacttatttcttttggtttgttttcatctacaataatataaccttttggtgtactaatatatttaacaccgcttcttcgttcagaacgtgtggtcataattcattaattcctccatatctgatgtgaaaaaaggagtgaaactagagtcgaagagtacgccgcgtatgtcggcatcattcaataaatttactcctttttccgctcctaaaataaaagctgatgtagataatgcatcggccatcatggcagaaggagcaatcgctgtacaactcattagactgcttcgagtggatggagataagggattaaccaaatgatgcatggatggttgcgtcttattttttctagcataatttcctgatgtgcagacagccgtatctgttacacgtaaagtcagtaatgactgcgtttgaatccgagggtgctgaatcccgactttccataactctccgtgttgattgagtcctttaactagaatgtctcctccggcattaatcataaaatgctgataaggaagggagcgggcagccaaatcaatagctaatcctttggcaaccgctccaagatctataatcatcggtttttgtaagagaaccgtttttttatgtgtatccaatacgatatctttataacttccagaatcgactgcttcgtccgtttgtatggaatttccatataagtaatgttcgttaaaacctcggttttctaattgttttcctaccgttgggtcaaagattccatacgtttcatttgctactaagacagcgaaataaagggcttcaaataatagaggactaacagaaacgggttctttgacatgtctaattagtttcatcacttcgcttttcgcatcaaatcgactgcacgtcgtttcaacggctttaaaaatagtaaatgcctttgaaatatggtgaaggacatttgcttcctctgattgcggagcaattacttgaagtgagacggttgttcccatacataatacagagcggctatacgtttttatggacatcgttcgtttctcctttatgcattcattgcttgctgaagtgcgtcatccacggcattttgaaaatcttctgtactaagtgttgctccgctcacgacgtcgacgtctgagctttgtctttgtacgacttgagacggaaggtcctcaatgtaactttgagaatagtgagtatctgcttctgtaatttcaactgtatcaattcggtcgtttttaatggtcacggatacgtagacggttccgatacggttgcttccttggccagaatacgtaccatctttgtattttgttttaggagcagaactttcggtacttgctgatgactggtttttattagacgaagctatatcttctccccagctgtcattgacaatcgtttgattgtctgtctgatctgtcgtttttttctgatgatgagccggtgtgacttgaacagcttgtgcatcagatagagtgtttatatagcccgttgcataaatacttccaatggctacactgcatgcagcaatcatcttcttgcccattttactcatgtttgttgaacctcctgatttgtaccagaactatagtttcgattgttgatggttatctttagcataaataaactttacaaataaacttttaaaaaagatttaaaatcaagaaagttttttcaagaataaatgagccattgggaaagatgattctaaataataaaggtaggcgatggaatttctttcacaagcctagctattttgacatacgtaataatagttaatatttctgtttactatctaaacgtgcatgataaaatagaaaagatgaatatgtgttaggaggaacatcagtgaaaattaagcttggccttttatacggaggaaaatccgctgaacataaagtatctttacaaacagctctagcagtttcaaaagcaattaatcacgataaatatgaagtgcatccaatttacattacagaaacaggaaagtggattcgcggcacacagctgactggtccgcttgaaacggttgctcaattagaaattcaagataatggaactgctatttcaccagtttcattgaatacggaaatgtttgcattaacagattcaaaaacagatgatcagctagatgttattttcccacttcttcatggtccaaatggagaagatggtacggtacaaggattattagaattattgaatattccttatgttggaaacggcgtattagcttcagcagctggtatggataaagttgtaatgaagcagctgtttgcacaggcaggtctccctcaagtagagtacgtatcatttatccgccgcgagtgggaagcagatcgaacagctgcttatgaaaaagtagaaacacttggatacccttgctttgttaaaccagcaaatttaggttcaagcgttgggattagcaaatgtgataaccgcgacgagttagaagcagcatttgttgaagctttcttattcgatcggaaaatcattgtagaagcagcagcaattggtcgtgaagttgaaattggtgtgttaggtaatgatgatgcagcttgttcagtagttggagaaatcttacctaaaaaagcgttttacgattacaaagccaaatatgaagacggcgatacaggccttattattccagctgaaattacagaagaacagcatcaagaaatgtcagcactagcaatcaaagcatttaaagcaattgatggatctggtcttgtacgtgcagatttcttcttaacatcagaaggtaaattcattattaatgaagtgaatacaatgcctggttttacacctttcagtatgttcccgttattgtggaaacacgcaggtgttgaatatccagatttaatcgaaaaacttgtatcactagcaattgaacgtcataccgaaaagcagcaaattaaacacacaatgtaactcacacaacactattcatcatgaatagtgtttctgtgtttagtttcaattaatgttatccatagttaactttatatcgagaggagcaaaccaaaaatgattaaacgtacgcttacacagttagctacaatgattccaggaagtatatttcatagtggaaacgaagcagctgtaattgagggagtctcaattgatacgagaaccattcagcaaggtaatttatatatcccaattaaaggggaacgttttaacgggcatgcatttgttcataaagcaattgaaaacggagcgctcgctacactgtggaacaaagatgaagaaaatccaccgacagacattagtgttattttagtcgatgatacgctagaagctcttcagcaattagcgaaatcctatcgtcacgagttagatattaaagtagtgggcattacaggaagtaacggaaaaacaacagcaaaagacatggtgaaagctgtgctcgatacaacttaccgcgttctgaaaacagatggaaactttaataatcatattggtatgccgcttactattttgcgtttagatgaaactcatgatattgcagttttagaaatgggcatgagcagccgaggggaaattgagtttctttctaatttagcggagcctgatgtggccattattacaaatatcggagaatcgcaccttcaagacttaggaagccgtgatggaattgcggaggcaaaattagaaattacaagcggcttagcgccaacaggtcagcttgtctataatggtgatgagccacttttaacgtcgcgcgttgttaatccagtatttgaaacggtgacatttggcagctcagaacaaaacgatttgtatccaagtgctatttcagctgaagagttaggcacaacattcactgtttcacgtgaaacaacatatccattctttattccggtattaggtaaacataatgttcacaatgcgctttctgctattgcggtaggtcattattttggactagacaatgaaacaatcgctaagggattaaaagaattaaaactaaccaatatgcgtatggagctcgtgaaacgaacagatggcctgaccttcattaatgacgcatataacgcaagcccaacgtccgttaaagctgctatcacgttgatgcatgatttagaaggctataagcaaaaaattcttgttctcggggatatgcttgaattaggcgatcaggaaaaagagttccacaaagaagtgggagagtttattcaagcagaaaaaattgattatgttctaacatacggccccttatctgttgaaattgagcaaggagcaaaaaataattttgcagaagataaggtaatgcactttgaggagaaagatgagcttgttaaaaaattaacagcgattacaacaagagaagatgtggttttagtgaaagcatctcgaggcatgaagcttgaggaagttatctcaaaaatgatgcataaattaccgtgatattaaaaagagtataagtaagctctattgcaaacggaaagccatagtgttatgatgtagtctgagtgtcttgaggcgcttatactctaaacgttgaatttattgaagtagtcgtttagagcattttccgtttcctcggagaatgcttttttttgtaaaatatagatagtctaaatataaaaggagtttgaaaaacttggcattatttcaagatttaggattaagtcaacagcttaataaagctgtgagtaaaatgggttttgaagaagcaacaccaattcaatcagaaactatcccattagcactagaaggtcacgatttgatcggacaagcacaaacaggaacagggaaaacagcggcatttggtattcctcttattgaaaaagttgatgtaaacgtagatgcaattcaagggttaattattgctcctactcgtgaacttgctgtacaggtatctgaagaactttacaaaattggtcaaacaaagcgcgtacgcgtgctatcaatttacggtggtcaagatatcagtcgtcaaattcgtgcattgaaaaagcaccctcatatcatcgtagggacaccagggcgtatgctagatcatattaatcgtcgtacacttcgtctacaagatgttcatacagttattttagatgaagcagatgaaatgttaaacatgggattcatcgaagacattgaaaaaatcttatcaaacgtacctgagaaccaccaaacacttttattctcagcaacaatgcctactccaatccgtcgcattgctgaaaaattcatgaacgaaccaaaagtggtaaaagtacaagcaaaagaagtaacgatgccaaacattacgcagtattatttagaagtacaagaaaagcgtaaatttgatatccttactcgtcttttagatatgcaatcacctgaattagctatcatctttggtcgtacaaagcgccgtgtagatgagttatcagaagcattaaatatgcgtggttattctgcacaaggtatccatggtgacttgacgcaatcgaaacgtctatctgtactacgtcaatttaaagaaggttctattgatgtattagttgcaacggacgtagctgcacgcggacttgatatttctggtgttactcatgtatacaactttgatatccctcaagatccagagagctatgtacaccgtatcggacgtacaggacgtgctggtaaaatgggtgctgctatgacatttgtaacgccaagagaaactggacagttacacaatattgagcgtacaacaaaacgtaaaatggagcgtcttactcctccaacgcttgatgaagcaatggaaggtcaacagcgtattgcagctgacaaattaacagaatctgtgacacaaggcaacttatcttactacaaacagttggcagaagagttacttgaagagcacgattcagtttcattagtggcagcagcgatcaaattatttacaaaagaaccaaacgaatcaccaattcaattaactgctgaaccaccagtaattgcaaaaggtgataaaaacaaacgtggaaatggcggaggtcgttcacgttctaactctaaaaactactcacagcaaaatcgtcgtggaaactcaaagcgttttggtgacaagcgtcgcggtggaagcaacggcagtgataatagaaatcgtaatagcagcagtaatcgtaaagattctcgcagcaaagcgtaaaataaaaacgagccttaacaggctcgtttttttatgtgttaattgctattttattggtgcacactatgagtaaaataaaatggggtgttcactgatgtcgaccattgttcggttaggttatgtggcgatgagcgttcatttggaaaatagttctccttctcaaacaatgacttttgcacaatttcagcgtgtgaaagaccatgaagcggccattcgcaagctcgaacgtattgcaatatccaacttagaaaactgcttacgtttattaaaacataatgcgtggagtgaaattgagttttttcgattcagttctaagttaattccattagctaaccatgaggcgctaaaagaatggaactacatagctcctttaaaggatgctcttcagcgtatttctgtatttttgaaagaacatccaatgcgagtagattttcacccggatcattttgttgttttaaactcaacggataaagaggtttttaagcattctattcaaactcttcgcatgcatcaaaagttgctgaaaggaatggatattcctcttcaaaatcgctgtgttttacatgtcggaggggcttataatgataaagaaaaagcattggagcagtttattcataattgggggcttgtacctcaatcccttcagcaaatgattatgttagaaaacgacgatacaacctttcatataaaggacgtcttgtatttatgtgaaaaactaaatgtcccaatcatttttgatcttcatcatcatcaggcaaacaacgatgaaactccatggcaagagcattgggaccgtatcactagaacgtgggaacaggaaacgcttcctctaaaaatgcatatatctagtcctaaaagtgataaagaatttagagcccatgcagattatatcgatgttcatgggttttacagctttttaaaagaagtaaatggaacgataccgcaaattgattgcatgattgaagctaagaaaaaagatgaagcgctctttcagttagtaagagacttgaagtcttatgaagatgtggaatttattaactcatccactttttatattaaatcttaaagcaggcctcatatctgtggcttgtttttctgtttgaacacgagaaaagcgagaagaaatccagcaatacctccaacgaaatgagctgtgttgttggttcttggcgttagcagacctgaaagtaatccaataattaagaagacgacaatgatttgctggttactttgagaaagcatatgcttttgttttattacaaggtagaggtaaaacccgagcagcccgaaaatggcaccggatgcacccacatggctgtagaaagaagattgggttagaaatgtaacgatatttccaagaaatccacacgtaaggtagaatagaagaaacttataagaagaaagaatacgctcagcacctggccctaacaagaacaatgaaaatgagttaaaaagaaggtgtgaaaagcttagatgcaaaaagataggtgtgaaaagtcgccagtagtctccttgagaaattaagctattcacaccaataagctgatgtataaaagattctgcaaggtttgagggaagagcggcaagtaaccatagcgcaatgtggatgcagataagcgtgaaggtaacagggtaaaaacgtttaaattcagctgcattttctgtgcgtacgaacatatttgtcactcccttttataaaggcatttttatatactattctgtaagagaggattaaatgaaaatgattataggaactggaattgatattacagagttagagcggattgaaaaaatggtgcagcgtcaaagcgcttttgttactcggattttaacaaaaaatgaaaaagaacgctatgaaaagctatcaagccgacgtaaggtcgaatttttagcaggaagatttgctgtgaaggaagcatattcgaaagctcttggaacaggaataggaaaagatttcagcttccaagatatcgaaatcgtgaatgatgaaagaggaaagccccacattgttacaaaacaaccactggacgcgtccgtacacgtatctatttcccacagtgcgcactatgcaattgctcaagtaattattgaacgcttgtcaagctagtctgcatattcactatttcttgttcatatattcatagtgtggataggggagacaagatatgttcttgcttctccgtttagctgtgaatatacgaaataaaggagttggggaaatgcataaaaaatggattggcttatttgtttgcgccttttttctcttagccttatcagcatgcggtgaaaaaagtcagcaggatgtaacagatgcattggatgccaaggtacaagaaatggcgggttataaatcagatgctaagatgacattaaatacagggaaagatgctcaagtatatgatgtagagatttggcatagtaagcctatgtattatcgagtgaatttgaaaaatacaaagaaagatcaaagccaaatgattttgcgtaatgatgaaggggtttttgttttaacgcctgccttaaataaaagctttcgttttcaaagtgactggccgcaaaatagcagtcaagcttatttgtatgaatcccttgtccaagatattgtgaaggatgaaaaggcaagctttaaatcaacggataagcattatatttttgaaacaaaaaccaactatcaaaatagcacgatgcttcctaaacaagaaattacgctgaacaaaagtgacttagcgcctgtttcggttaaaattatggatacggataataaagtgttaataaaagttgatttctctaaggtcaaattcgattctaagtttgataaaggggcttttgatacaaaaagaaatatgacaagtgcaaagattgacgttccgacattagctcagcagaaatcatttagcgtcctttatcctaaggatgttccaaaaggtacaaagctgtccaaggaaaagaaaattgagacagaaaatggcgaaagagtcgttttaatgtacaaaggagaaaagccgtttacgcttgtacaagaaaaagcgcaagtagcaaaaacaacgacatctacagttactgccggagagccatttgatttaggttttactgtgggagctttaacggataaaagtctatcttggacatataatggagtagactttatgctggcttctgatcagctaacaccagatgaattgagtacagttgctagatctgtgcaaagtcagatgggaaaataagagaagcttacaagcctgcatatatgtaggcttgttcttgcttaatttgaataaagatcgagatgaagtttggctatagatgtattatactaacagaggaaagtacgtttagaatggttctgaaaaaaggaagtgtcgtagtaatggatgcattttatagagaaacatgggcagaaattgatgtagaagccatttttcaaaatgtgaatcatgtaagagaactaataccggggcataaaacgttaatggccgtagtgaaggcgaatgcgtacgggcatggagataaagaagtagcagagattgcgcttcaagctggtgctgatatgctagctgtagcttttttggatgaagctattgctcttcggaaaaaaggaataaaggaatccattttagtattaggcgccgtgcctaccctacacattcaaactgcattggagtgggatgtaacggtcactgcttatagcaaagcttggattgaagaagcggcgtccattctaggtgaaaacagtcagctgcatatgcatttaaaaatagatacaggcatgggtcgcttgggagttagaacaaaagaagaattacacgaaacgatgaagatcatcgcttctcattcgggattcgtgctggatggagtgtttacacactttgcaacagcagacgagctaaactcgtcttattttgaagaacaatacacattctttgaagaaatggttcgaattgtgaaagaatataattttacacctccgatgattcactgtgcaaatagcgcagccttgcttcgtcgtccgaaagatatctttaatggcgtacgcttaggtatcgctatgtatggtttgagtccttctgaggaattaaaagaagtcttgccaattccgttaaaacaagctttttcgctgcacagccgtattgtgcatgttaaaaaagtcaaaaaagggagtcatatcagttacggagctacttatgaagctaaagaagatgaatggattgctactattccagtaggatacgcagacggctggattcgtaaattaagcaattttgaagtattagtagatggagttaaagtgccaattgttggtagaatctgcatggatcaattgatgattaaattacctaaaatgtataaaatgggtacaaaagtaacatttattggaaaacaaaaaggtgctgaaattacaattgatgaagtagcgaagcatcttgaaacaattaattatgaaatcccttgcatggttgcagcaagggttccgagggtttatacaagagattcgcagcatattgatgttaataattatatcttgcgctgaatatacatcttcctgagtcaacataaaaagtctgcgaataaaagacaataaaataataacttccatgcataaaagagggtatcaattgacgataatagtgtagaaattgacagaattaactttccattaaagctaatcaatgttatgataaggaaagatgagactattggtgtgtgtattgatgttggaggtgtatgtttgtgtctgaagcgagcgcaactacagaaatcctagtaagattaccgaaaaatttagtatcggagctcgatcttatggttaaacaagaaaatggcaaccgaagtgattttattcaccaagcaacaaaattgtaccttcgtgagcgaaaaaaacgccatattcgcgaatcaatgagacgtggatatatggagatggcaaagataaacttaaatattgcttccgaggcttttctagcagagtatgaagctgatcatactgtggatcgtttagtaagcggggggtaatgacttggtagtcaaacgtggcgacgtttattttgctgacctatctcctgttgttggctcagaacaaggaggcgttcgccctgtacttgtcattcaaaatgatataggcaatcgttttagcccaactgttattgtagctgcgatcactgctcaaattcaaaaggcaaagttacctacgcatgttgaaattgatgcaaagcgctatggatttgagcgagattcagttattttactagaacaaattcgtactattgataaacagaggctaacagacaagattacccatttagatgatgaaatgatggacagagtggatgaagccttgcaaatcagtgtaggacttatcgacttttagaattatacttccatttatgctaagttgctcctttatgagcaacttttttaatttgactaggaataatcagtaaacgtatattgtaataagaaacgttttaaaaatgataatatatatagatagatataaatgagtgtattgactcacaaggaggacctcatgaatcaagatttattcaattatatacaaaatcataaatcagaaatttttgatcgatggctagtgttaatgaatgatgtggaaacagagcggattaaaaacattgtatctgagcaagtgtacgtaaatgtaagctctgattttgtaaatttacttttggcaaaagcattccgtgaacaggaaaattttgcagaggaactagaggaagtagtaggacgagttgtgagtttaggatggcctcttgcttatttgacacagggtgtacgtaacttgggtcacgtagtggttgaagggtatgtaaacagtgaacatgtaaaggctgaccaaactcattctgaattattctatcggtttgacaagtggttaagccctatttataacaaaatagtagaacaatactccaactcgtgggaaaatacagttatgttacaaaaagtggcacttcaagaattgtctgctccattaataccggtatttgataaaattaccgtaatgccgcttgtagggacaattgacactgatcgcgcaaagaaaattatggaaaacttactgcaaggtgtcgtaaagcaccgatcagaggtcgtattaatagatattaccggagtaccagtagtggatacgatggtggcccatcatatgattcaagctgctgaagccgtacgtttggttggagccaagtgtttgttagtaggaattcgtccggaaattgctcagactattgtgaacttaggtattaacttaaatgaaattattacgaaaaactcattaaaaaaaggcgtagagtttgcgttagaaatgactgagcggaaaatagttgatatagaatcggaggaataaacgtgagaatacccattttgaaattgtacgactatttattggtatccattcaatgggagctggatgatcaaacggctattcaattccaagaagatttgctaagtaaaattcatcaaactggagcaaaaggagtggtaatcgatttaacttcaattgatatgatcgattcattcatcgcaaaagttttaggtgacgtggttagcatgtctaatttgatgggggctagagtagtattaacaggtatccagcctgcagtagctattacacttgttgagttagggattggcctaaatgatgttcttactgcactcgatttagaaaaaggtcttgagaaactccaatcggaattgggggattagtatatggaattccaatccagcgtaaaaatcgtaacagaatgggacatcgtagcggcacgccaattaggtagaaatgtgtcgaaagagctagggtttggaacagttgaccaagctcgtattacaaccgccatttctgaattagctcgtaatatttacctatatgcgggtaagggtcaaatctatattgagaaattaaatcgtggaggaaaaaacggtcttcttgtcgtagcaacagatgaagggccaggtatccccgacgttcgcaaagtaatggaagatggatactcaacatcgggtggactaggagctgggcttcctggggtaaaacgattgatggatgagtttgacatcgaaacaaatgtcggagaaggtactgagattaaagcagttaagtggctccggtaggaggaaatagataatgtcttttgataaagagatgagagatttatacaaagatattttggggaactatatccaaacacaaaatgaacaaattttgtatcaaggacaaaaactaagtagaaaatctttagagaatgaaatatcgccagaagatattgtgagcattcataaagaagtgattgaagaaatttattctgatattccagaaaaagtgctgcattctctggactttttacttgaggtaatgattagctacggtcttgctcttcgcgagcatcaaacattaaaaaataagcagcgggaacttcgttctgaaattgaagttgccgctaacgtccagcagacgctgttggggacaaaggttccggctagttcaactttagaaattggtgcgattagcgtaccggctaaacagatgaacggagattattttcactttgtagaagaagagcacggtgggttaagtattgccattgccgatgtgatcggcaaaggaattccagctgcaatgtgtatgtctatgatcaaatatgcaatggacagcttaccggactcaagaaaaaatccaagttatgtattagagaacttgaataatattgtagagcgaaacgtagatccaagtatgtttattacgatgttctacggaagctataatcccgagacaaacttatttgattatgcatctgcagggcatgaaccaggtttttattatgatgccaaagctgattcatttgaagatttggaagcaaaaggactcgtgctaggagttgatcgccatgtgaaatatcttcagtacgagcagcagctttcaaaaggcgatatgattgttctgttaacagatggcgtaacagaatgcagaactgaagaaggatttattgaaagattggacatcataaaattaattcgaaaatacatgcatttgtctcctcaagaaattgtagaatctgtatataaagagctggaaaaattacagcattttcaattgagggatgactttacattgattattttgaagagtttagtttaagtattctaaataagggtacagaaaagatagcacaaaattagagggggtctactaatacgatgaatttaaaaatagatatacaaaaggacggtcaagcatatcgtattaagctggctggagagattgacgcatatacagcacctaagctaaaagaaaagttcatggaaattactgaacataccgaaccagaaattatagtcgatttaaccgatgtatcatacatggatagtacaggactaggtgtatttattgcattgttaaaagccaataagaaaaataacggctctttgaaatttgttggtgtatcagagcgcatcaagcgcttatttgatattacgggcctcacagacattttaaacgtgaattcacaagtagaaggtggcgtaaaatgaaacagccttatgactttgttgagatgaagattcctgctaagccagactacgtagcgattattcgactgacgctgtctggtgtagcgaaccggatgggtttttcttatgatgaaattgaagatatgaaaattgctgtgagtgaggcatgtacaaatgccgtacagcatgcttacaagaatgaagaaaatggtgaagtgagagtaggttttggtttatttgatgaccgtttagaaatcatggtggtcgataaaggtgaaagctttaattttgaagagcttaaggaacatataggaccttatgaaacatcaagagaagttgaatttcttcctgaaggtggacttggtttatatttaattgaaacactaatggacgaagtgaaaatggtcaattcaaaaggtgtaacgctaatgatgactaagtatgtgcaaagagagcaggtggagagtgatgaaaacacagtctcaacctatgaaattaactaaagaacaggttcaggaacgaattgagcgctttcaaaaaacgcaggatgaagaagcacaaagtgatctagtagtacattacaagaaccttgttgaatctattgcacgtcgctattcaaaaggcagaagcttacatgaagatattgtgcaggtagggatgctaggactgttaggagctattagaaggtatgatgcttcatttggaagaagctttgaatcgtttgctgttcctacaatcattggagagattaagcgatttttacgcgataaaacgtggagtgttcacgtaccgcgccgcatcaaagaattaggtcctaaaattaaagcagctgtcgaagagctaacaacccgtttacagcgatctcctcaagtgaaagaaattgctgatcatatcggagtgacagaggaagaaattttagaaacgatggagatggggcaaagttatcaagcattgtctgttgatcattccattgaagcagactctgatggaagtactgttacaatccttgatttagtaggtgaacaagagtcgggttatgagaaaactgatcagcgcttagtgttagaaaagattcttcatgtattaagcgatagagaaaaagaagtgattcgctatacatttattgaaaatctgagtcaaaaagatgccggtgagaagttagggatttctcaaatgcatgtatctcgactgcaaagaagagctcttgataagctaaggactgcagctcgctcagattctaacgattcggagtatatgtcgtgatgacagtagaccctaatacaaagttgattcaaactcatatataccaagagccaaagcaagggaacgtatgttgtggagatagttactatgtcaaagaaacggatgactattttctatgtgcagtggcagatggattaggaagcggtgaacaagctagagccgcttctgtagctgttacggatgtagcgaaagctcatcatcatctagatgtggatgagatcatttctaagtgtaacaaagctactcgacatacaagaggtgcggcagtagctattttgaaaattgataaaaaacataacgaatttcattatacaaatgtaggtaatatccgcttttatctgtattctccggaggggaaattaacgtaccctctgccaattcaaggttttttatcagggaaaattcaaaagttccgcacacaaaccttcccatatgactccggttctaaatttttgattcatacagatggcttagaattaaaagagattaaatctgtttttgctaactcgatgaatgtagatcaattgtcgacacggctacaggcagcaattcgatctcataatgacgatattacgtatatcgctggtcatcttccaactgcatagcctttctttttagctcacatgtgttattgcatgtgagttttgttacaataaagacaaagtttcatttagctaggaggataagctgtgtctgttgcaacgaaattagataatcaaattgttcaacgtgtaagtaaagaggtggagatttcacaaaagcaagtacaaaacgtaattgctttagtagaagacggtaatacagttccctttattgctcgatatagaaaagaacaaactggtgctttggatgaagtccaaatccggaatattttagattcctggaattacttaatgaatttagaagagcgtaaagaggaagttcttcgattaattgaagagcaagggaaattaactgaggaactggctgctcaaattcatcaagcgaagaaattgcaacaagtagaagatttataccgcccttttaagcaaaaacgacgtacaaaagcaactgtagcaaaagaaaaaggtcttgaaccattagcacagtggctactaagtcttccacgttctgacgtgaagaacgaagcgaaaacatacataaatgaagaagcgggagttcaatcttctgaagaagctattcagggagccctagacattgtagcggaacaaatttctgacgaagcatcttaccgtcaatggattcgtacgactactgtaaaagatggcataattgttacttcagtcaaagatccggaaaaagatgaaaaaaatatctatgaaatgtactatgaatatacagaagcggtaaagcgaatcgttcctcatcgtatcttagccatgaatagaggagaaaaagacggtattttaaaagtgagtattgatgcgcctacagatcgtattctttcatatttacataaacaagtaatcaaaaaaagggattcttcagctgaaagttatatcatctcagctatagaagatgcttataaacgcttaatagaaccatctattgaacgcgaaatccgtaaagagctatcagaaaaagcggaagaaagagctattcacatcttttctgaaaacttacggaaacttcttctccaacctccattgaaagggaaagtggtattaggagtagatccagcttttcgaacaggctgcaaattagctgtagtagatgaaacaggcaaggtattaaaaattgatgttatttatccacatcctcctgtgagaaaagcagctgaagcgcaaaataaattaaagaaaatgttcgctgaataccctattgaagtagtagccattggaaacggaacggcatctcgcgaaacggagcaatttgtagcgggtgttcttaaagagattgaaaacccagtttattatttgattgtgaatgaagcgggagcaagcgtatattcggcttctgatgtggctagagaggaatttcctgattttcaagtagaagagcgaagcgctgtatcgattgccagaaggctgcaagatccgctggctgaacttgtgaaaatcgatcctaagtcggtaggagtagggcagtatcagcatgatgtgtctcaaaagcaattaaatgattcactgacttttattgtggagacagtagtaaatcaggtaggagtaaatgcaaacacggcttctgcttcgcttctacaatacgttgctggtctaaataagacagttgctcaaaacattgtaaaatatcgggatgaaaacggaaaattctctaaccgaaaacagttgaagaaaattccgcgtctaggcgctaaaacgtatgagcagtgtattggttttttacgtattatagaaggtgaagaacctttagacagaacgggtatccatcctgaaacatatggagacgttaaaaagcttttaaagaaagttgaagtgaaagagactgagcttggaacggagaaagtaaaagaagcattaaaacatatttctttacccgaaatatcagaagaactaaggataggggagcttactttaaaagacattatagaagcgcttgtaagaccggaaagagatcctcgtgatgaactgccaaaacctttgctccgtcaggatattttgaaactagaggatcttgccaaaggtattcagcttgaaggcacggtgcgaaacgtcgtagacttcggagcgttcatcgatataggagttaagcaagacggtctagtccatatttctaaattaacaaatcggtacgttaagcaccccctcgatgtcgtttcagtaggagatttggtgaatgtgtgggtagaagacgtagatatgaaaaaaggaagagtcgcactgacgatgattccgcctcatcaataataaaattgccttttcagattttctgaaaaggcaattttatttgtaaaaagaagtgatttaagaagcggagttatttttttgataaaaaaaccaacattgattgagcaattttatttgtgcacggtctttttcagaataagcgcgcctcatttgtttttgtagccacattggcataaggacaatcactccttttcatttatgataaggtaaatagtgagtatgtaatgaagtgtatgcccaaagagctagtcaggtgatttcatacagtagaggagtatataagatgaatgataaggatttacaaatacttgtagaagaaatttcattgaagctgtttcacaaaccatttcgtcatgaagccacttttaattctcgtttacgtacaacaggtggaaggtatttattacgtacatctaatatagaagtaaactacaaatactttgaacaatatggcacacaagaaatagtagcaatcattaaacatgagctctgtcactatcatttgcatattgaggggaaagggtataagcatggagatcaagactttaaaagcctaatgaaagaagtaggcgccccccggttttgtcaggcattgaaaaaagaaagtgatggaaagaaaaaagagcacatatatgtatgtatgcagtgtgagcaaaaatatgttcgaaaaagaaaagtgaacacggttaaatatgtttgtggaaagtgtaaaggtaaattaaaaaaagtgtagaagatgcttgactaaaatagattgattatgataaattaataaagccgtctcaaataaacggcaaagaaattacaaaaacttattgacattacatataatgtcgattacaatgtaagaagtctgataaatattattccacagtagctcagtggtagagctatcggctgttaaccgatcggtcgtaggttcgagtcctacctgtggagccatatggagaagtactcaagtggctgaagaggcgcccctgctaagggtgtaggtcgtgtaagcggcgcgagggttcaaatccctccttctccgccattttataatggcccgttggtcaagcggttaagacaccgccctttcacggcggtaacacgggttcgaatcccgtacgggtcaccattgatttttatttacatattctgtggaggattagctcagctgggagagcacctgccttacaagcagggggtcggcggttcgatcccgtcatcctccaccatttgactgttttatacataattttggatggtcccgtggtgtagcggttaacatgcctgcctgtcacgcaggagatcgcgggttcgattcccgtcgggaccgccattttaaattattgggctatcgccaagcggtaaggcaacggattttgattccgtcatgcgttggttcgaatccagctagcccagccataaagagccattagctcagttggtagagcatctgacttttaatcagagggtcgaaggttcgagtccttcatggctcattttcatttcttgcgggtgtggcggaattggcagacgcgctagacttaggatctagtgtctttacgacgtgggggttcaagtcccttcacccgcatcttattcattttatgtatttagcggtcgtggcggaatggcagacgcgctaggttgagggcctagtgggggcgaccccgtggaggttcaagtcctctcggccgcaccaaaaaaactttttaaaaaagtgttgacataagaaaatagaaatgatattataataaagtcgccaaaacaacggcggtaaacatcataagaagcgcccgtagctcaattggatagagcgtttgactacggatcaaaaggttaggggttcgactcctctcgggcgcgccatattgcgggtgtagtttagtggtaaaacctcagccttccaagctgatgtcgtgagttcgattctcatcacccgctccaaatatattgaactttgaaaactgaacaaagcgacaaacgtcaacgttaatttttattttttaaattgagcaagtcaaacatttcttcggagagtttgatcctggctcaggatgaacgctggcggcgtgcctaatacatgcaagtcgagcgaactgattagaagcttgcttctatgacgttagcggcggacaagatgagatttcccatagcgcaagctagtaagatccctgaaagatgatcaggttgataggtcagaggtggaagcgtggcgacatgtgtagctgactgatactaatcgatcgaggacttaaccaaactttaaaagcgtaagctttactcagcaaactgttacctagttttgagagaacaatctcatataaatgtctagtgataatggcaaagaggtcacacccgttcccataccgaacacggaagttaagctctttagcgccgatggtagttgggactttgtccctgtgagagtaggacatcgctaggcatttttattttgcttttttatcatcgcggggtggagcagttcggtagctcgtcgggctcataacccgaaggtcgcaggttcaaatcctgtccccgcaaccaacatggtcccgtggtgtagcggttaacatgcctgcctgtcacgcaggagatcgcgggttcgattcccgtcgggaccgccatgttttagaaacgaaacaatgtgtttcgtcttttttattgtttgaaccatttttatataaaactttaccgtccttaggagcaatcctaaggaattttttatatacaaagaaatttccttatagaattgcgatgttaaagattgttggatttcttactggatatgtatagtccacaacgtttacaatatatatatacaggttgaagtgaggttctgaatgaatgacagagattaacgaatttacgtttatgtctacgtctcctgatgaaactaatcagctggctgctcgtctagcaactttattagaagctggtgacgtgctgctgcttgaaggcgatttgggagctggaaagacaacattcacaaaaagtttagctaaaggattaggaattgaacgcaatgtgaatagcccgacatttacgatcattaaagaatacaaaagcggtcgccttcctctttatcatatggatgtgtaccgtctaggggatgaatttgaagacctagggttcgatgagtattttgaaggagatggcgtgacggtcgtggagtgggctcatctgattgaagagcagcttcctaatgaatatattcaaatcaatatttaccatgaaaacgaaacgactcgtaaaatccttgtaaaagcgatagggagtcggtacgttgaaatatgtaaggagctttttaaaagatgaaaatgttagccattgatacatccaattttgtcatgggtgttgctgtcgttgaagaaaacaaagtaattggagaaattattacgaatctaaaaaagaatcactccgttcgtgtgatgaacgctgtggaatctttgttaaaggactgtgatattgcgccaagcgagctagaccgcgttgtagtggcgcacggtcctgggtcttatacaggtgtacgcattggcgttaccattgccaagacacttgcttggactttaaatattcctttaataggtgtatctagccttgaggcactagcagcaaacggtcgctattttgatgggtatattgctccgttatttgatgcgcgccgtcaacagctttatacaggactatatgaatggaataacgaacgaagtcttctagaagttgaaagtgatcgacttgttattaataaggactgggcggaacatttaaagtcatacaacaaacctattttattcataggcaatgatcttcctatgcatgaagagacgttaaaagaagtgctgggtgaacaagctgtatttgcccatgttcagcagtttaatccaagaccaagtgaattggctttcttaggaataaagaaagagccgcagtctgtgcatacttttgttccgaactacattcgtttagctgaagcggaagccaactggcttgcttcacagcaaaaaggataaaagaaggtataaacatgaaactaacaattaagtttcgcttaatggaagttaaagatattgatcaagtagtgaaaatcgaagagaagtcttttacgacaccttggagttcagaagcgtttcaaaatgagttaaccaataatcaattttcaacttacattgtgatggaagaaggagaaaatattattgggtattgcggaacgtggattgttattgacgaagcacatgtaaccaacattgccctattgccagactaccgaggtaagggactcggtgaattgctgctgcgcaacgtgatggacgttcttcgaaaactaggtgctgcgtcaatgacattagaagttagggtatctaatcatattgcacaatcattgtatcaaaagctaggttttaaacctggaggtattcgtaagaattattattctgataacaatgaggatgcattagttatgtgggtgaatttatgagtgaaaatcaattaattttagcattagaaacaagctgtgatgagacagcagcggccgtgattcgaaacggtcatgaaattgtagccaatgtggtggcatcacaaatagaaagccataaacgatttggcggtgtcgtaccggagattgcatctcgtcatcatgtggaacaaattacggtagtagttgaagaaactttaaatcaagcgaacttgacgtttgcagatattgatgcaatagctgtaacggaaggacctgggcttgtgggagcacttcttattggcgtaaatgcagccaaagcgctagcatttgcgcatcaaaagccattaattggtgttcatcatattgcaggacatatttatgcaaatcagttaatcaaaaaattagaattcccgcttttatcgctagttgtatctggagggcatacggagcttgtatacatggaaagtcacggtcagtttaaagtaattggtgaaacgagagatgatgcagcaggagaagcctacgataaagtagcccgcacgttaaaccttccatatccaggtggaccgcatattgaccgccttgcacatgaaggagagccattaattgatttgccgcgtgcttggctagaagaaggatcctatgattttagtttcagtgggttaaaatcagcagttattaacactgtccacaacgcgaagcaaaaaggtgaagaaattcttccacaaacgcttgctgctagctttcaagcgagtgttattgatgtgttagtaactaaaacggttaaagctgcaaaggaatataacgttaagcaagtgttagtagcaggaggagttgctgctaataaaggacttagagcagcgctagaagaggcatttgtaccattatcaaacattgagcttattatcccgccgctgtctctatgcacggataatgccgcaatgattggagcagcggcaagtgtacgatttgctcaaggaaaacgctcagatatgtcattaaacgcaaaccccggtttagacttggaagagtaagagacgagtgagatttatttctcattcgtcttttttgtgggtaaaaataatttatcaacaatattcaataaatttagaattgcctgtggataattatgtggaaaagtccgtgtactcagtacacggacatgttatcaacaagttttaattatgaaaatcagacagatatccactatttattcacatagtggataaagcttgttctaaagggcacgaacaagtaaatagggcgaataaatacgaaaaaatacaggctattcttctagaagcagctgtaattcttcccactcttccattaatgtggataactgtgaagaaattttttcattttcaccgttcaatcttgatacttcttcgtggttttgataaatttcaggatcacaaagaagttcttcattctccgcttgtgcggcttctaatttgtttacttcagtttcaatttcttcaattcggcgcgttcgctgcctcatcaatttcttttgttctttatcttgtttataggactgtttatctacttttaccgtacgttcttcgtttgcttttatattttctaattctttgatttcctctatttctgctttcttttcgacataatagtcataatctccaagaaattcttctaccccttcaggagatagctctgctattttgtttgcaatacgattaataaaataacggtcatgtgaaacaaataatagagtccctgggtaatcaattaatgcattctcgagtacttgtttgctatctaaatcaagatggttagtaggttcatctaaaattaagaaattagctttttgaagcataagcttcgaaagagccaaacgtgctttttcaccaccgctaagcgtcgaaacgattttcagtacatcatcacctgaaaacagaaaatttccaagcgctgtacgaatttctttttcaggtttggatgggtagtcatcccaaagctcatttaaaacggttttattagaagttaaattagcttgctcttggtcgtaataaccaaccattacgtttgagccaaaagaaatggttccagtcttgaagcttagtttatccacaataccttttaataacgtagatttcccaactccattagggccaaccaatgcaaggctttcaccttttttaatccgaaggtttgcctcttggacgacgtatttgtgttcatcatatccgatagacacgttttcgagatttaagacttcatttccgctttgacgctcaatttcaaacgaaaaactagctgatttttcgccttcgttaggtcgatttattaactctattcgatcgagctgtttccgtctgctttgcgcacgttttgtagtcgatgcgcgggcgatatttcgctgaataaaatcattcagttttgcgacttcatcttgctgcttttcgtactgacgcaactctttttcatatcgctctgctttttgtacaaggtatttagagtagttgcccgtgtacttgaccgttgttttttttgtgacttcatacacttgatttacgactttatcaaggaagtaacgatcgtgtgaaacaattaaaatagctccttcatacccttgcagaaactgttccagccatgctaaagtttcaatatctaagtggttggtaggctcatccagaataagcaagtctggctttgttaaaagcagttttgcaagagccaagcgcgttttttgtccaccgctcaaggaggaaataggggtgctatagtcaaagtttgaaaaacggaaaccgtgaagaatagatcgtgtatccgcttcatattgatagccgcctaaatctttgaacgttacttgaagctgatcgtactctttggttagtttttcgtattgaactgaatcattaaaaatgtctggatcgcccatcttcgtttcaagcgtacgtaattctttttccatcttctttaatggagcaaagaccgtcatcatttcttcccatatggagagtgttgactcaagaactgtatcttgtcccatataatcaatggaaacacctttaggtttaataatttctccgctgtcataagaaagctgctcagcaataatttttaataaagttgatttaccagcaccgtttcgtcccactagggcaatgcggtcttttgattgtacttctaactttatattcgataaaatgggttctgccccatagtattttgtaataccgttcaattgtagaataatcattttttcacctctagtagtatatccatagtgtattttaacatattttcaactacaagttcttcctacaagcgtttgtaatttgtagagggacaaggacaaatgatgaagcgaatgttttgattcatgaaataaaatgattttacctgcacattttatacaggatactatgttaaaataagagataagtgcatctctgaacttatatatgatggatgtagaaaacccgtcatgactaacaaacggatcctttgaagggctaattgcttcgttctaactaccgactttaagtagtgctggatagccaaaaggagtcggggtatgaagcggagtatatataaaacaagagaaaagagagagaattggaagcgctacctcggagcggttgaggctttgtgaaaggtaatgcaatatgacttgaaaatgttagtaatgacatacatgaactgagggggtacaacgtgaacactgaacaattaaaaataccacaagcaacggctaaacgattgccgctttattatcgttttttaaaaaacttgcatgcttctggtaaacagcgtgtttcgtcagcggagttaagtgaggcagtgaaagttgattctgctactattcgtcgggatttttcttactttggagcattagggaaaaagggatacggctacaatgtaaattatttacttacatttttccgtaaaacgttagaccaagatgaagtaacgaaagtagcactgattggcgtagggaatctgggaacggcctttttaaattataattttattaaaaataataacaccaaaattgagtgcgcttttgatgtgatagaagataaagtcggtacaaaagtaggcgacgtgccggtttatcaccttgaccaattggaagattatatgagtgatgatatctcagtggcgattttaaccgttcctgccactgtggctcagcaaattaccgatcgtttagtgaattgcggaattaaagggattttaaacttcactcctgcacgcttaaacgtaccggatgagattcgactgcatcatattgatctggctgtagaattacagtcgcttgtctactttttgaaaaattatcctgttgaataagatggactgtgttacgatttccttaagtctaaattaataaggagagtgggaatatggggattggagcaggtagttggattattattgcgattgtagcactgcttatttttggaccgaaacggttaccggagctaggaagatcagtcgggcaaacgcttagagagtttaagcatgccgctagcggtgcatcagaagatcgtgaaaaagataaacagcgtcaagtagatgacaaagagtaaaagggtgatcatagtatgaccgaacaagaaatgtcaatatatgatcatataggagagctgcgaaaacgcattttaattgttttatttttctttgtcattgccacaattggcggcttttttatagcggataaggttattgtctatttacagcatgctgatgaggcaaaaaatttaacgatgaatgcatttaggctaacagatccagttaagatttatatgcagtttgctgttattatcggctgtgtacttgcagctcctgttgcactgtatcaactttgggcatttgttagtcctggtttatatgaaaaagagcgtaaggtaacgcttggatatattcctgtttccatttttctctttatcggcggtgtctctttttcttattttgtgttgtttccatttgtcgtcgattttatgacgcgggtttccgatgagctgaatgtaaaccaagtgattggcattaatgaatacttttcttttttaatgcagctcacactgccttttggcctgttgtttcagcttcctgtcgtcgtcatgtttttgacgcgattaggaattataacgcctatgtttttatctcaaattcgaaagtatgcctatttcgtactgctagttattgccgcactgattacaccaccggaattgctctcgcacatgatggtgacagtgccgctcttaattttgtatgaaatcagcatcattatttcccgcatttcgtatcgcaaagtgttaaaggcaagggcagagcaagaaagagaagatgttagtatgtaaaaaaaccactgaaacagtggtttttttatttagatgaatcatcttgatttttatattgctgctgcaactttttaactttatagtgcaagataaaaatgcgaaccgcaaatctgaaatcgaatgcggctacgagtgcaaataagatcgtagggaagttccacacggtttcctgagcattttgaatagccaggtaggtgaataaaatccccataataatataaataaaccctcgtgttaaagggatattcttcataaaaacatgcctccaaaaataaactgcatttgttctgcttgcttttgcatttctataattttatctgcaaaaatagtttgagataaaataacgattgtattcatcaacacgtgagcaataatgggtacaataattagttttgttcttgcataaaggaatgcaaatacaaatcccatggctgtatacacgagcaaatgtttaaaatcccagtgtacggcagcgaaaataagggaactaataaatgcagagataaaaaaattatatcgtttgtgaagagaaccgaaaataatctttcgaaaaataatctcttctagaattggtccaataacagacgtaacgacaataaggaacggcgttgctttaacaagattaacaatgttttgtgtattttcagatacttgggtaatgccaagagcgtgctcaatcatccctgctacagcttgaccagccatagccaggaacaccccaaggactgaccagaccacagttaccgttgttcccgcatgttctatacgcatggacatgtcacggcgcagcagcagtaagacaataagtaaaccaaggataaagctaatgatggtccaataagtcaaaagcatgacagtcgctgttcgaactggatattgatcaaacattcctgttaattttaacagcggtataccaacaactcctgaaaactgcataaggatgtaggtgaggataacataccaataacgtttttccaatcttctatactcctttaaaaggtttttatgtatatatgtcgaagaagtactgtaaagttagtaatttcttcttgctcgtattgtaacatacatattattgaacagagaaaagaatgctttatttctcaaaatcgtcaaaatctaagactattatatgtagttttcgtaaattttaaattttttttgtttaatacttgcaaaaaaaacccactttgttttaatataataattgtgttagcactcgttgagcttgagtgctaataaaaatgcaaacatattatttgaggaggttgtttcacttgttaaagccattaggtgatcgcgtagtgattgaacttgtaaaatctgaggaaaaaacagcaagcggtatcgtgttaccggacagtgcaaaagaaaaaccacaagagggtaaaattgttgctgttggtacaggccgagtattagaaagcggtgagcgtgtagctttagaagtagctgcgggcgatcgtatcatcttctcaaaatatgcgggtactgaagtgaaatacgaaggtactgaatacttaattttacgcgaaagcgatattttagctgtaatcggctaattttaaccacaaacttatcatacgtaaaaaatagattattaagaaaatcttgaggaggtcaaagaacatggcaaaagacattaaatttagcgaagaagcacgtcgcgcaatgctacgtggtgtagacacattggcaaatgctgtaaaagtaacgcttggaccaaaaggtcgtaacgttgtattagaaaagaaattcggttcaccgcttattacaaatgacggtgtaacaattgcaaaagaaatcgaattagaagacgcatttgaaaatatgggtgctaaattagtagccgaagttgctagcaaaacaaacgacgtcgctggtgacggtacaactactgcaacagttttagcgcaagcaatgatcagagaaggtcttaaaaacgtaacggctggtgctaacccaatgggtatccgtaaaggtatggaaaaagcagtagctgtagcggttgaagaactaaaagcaatctctaaaccaattcaaggtaaagattcaattgctcaagtagcggctatctcagcagctgacgaagaagtaggtcaattaattgctgaagcaatggagcgcgttggtaacgacggcgttatcacacttgaagaatcaaaaggtttcacaactgaattagaagtggtagaaggtatgcagtttgaccgtggatatgcatctccttacatggtaactgattcagataaaatggaagctgtattagatgatccatacatcttaatcacagacaaaaaaatcggtaacattcaagaaatcttaccggtattagagcaagttgttcaacaaggcaagcccctattaatcatcgctgaagacgtagaaggcgaagctttagcaacattagttgtgaacaaacttcgtggtacattcacagctgtagctgttaaagctcctggtttcggtgatcgtcgtaaagcaatgctacaagacgttgcgatcttaacaggcggagaagtaatcactgaagagcttggtctcgacctaaaaacagcaagcattgatcaattaggtcgcgcttctaaaattgttgtaacaaaagaaaatacaacggttgtaaacggtgcaggaaacgcagaagacatcctagcacgcgtaaaccaaatcaaagctcagcttgaagaaacaacttcagagtttgaccgtgaaaaattacaagagcgcttagcaaaacttgctggtggcgtagctgtaattaaagtgggtgcggcaactgaaactgagttaaaagaacgtaaattacgtattgaagatgcattaaactctacgcgtgctgcggttgaagaaggtatcgtagctggtggtggtactgcattagtaaatatctataataaagtagcaagcatcgaagctgacggtgacactgctacaggtatcaacattgtattacgtgcgatcgaagagcctgtacgtcaaatcgctcacaatgctggtttagaaggatcagtaatcgttgagcgtctaaaaggcgaagcagttggaactggattcaatgctgcaactggcgagtgggtaaacatgctagacactggtatcgttgacccaacaaaagtaacgcgttcagctcttcaaaatgcttcttctgtagcggctatgttcttaacaactgaagcagttgttgctgacaagccagaagaaggcggagcacctgcaatgcctgacatgggcggcatgggtggaatgggcggcatgatgtaatagccgctcaatcccttgacatccagggacttgagagagagttgctaacaaaatagcaaaatcagtataaatataagaggcttctcattagttgttcaaacttttgagaagcctctttttattccatctgataagtcataattaaaagggcaaggcatcttgtctcagcggcacgtacaacaactaattacgaataggacacggtattagatgggaggagataaatggatttgtatattgaaaagcttggttaaagacgatcattttatcgtaagcacataagctgaaagactggggaaaaaatcactttccgggttttttagctaagaaaagcatttttatttatttaaatatctccataacgtcgttcgactgatgcccagctgctcagctgctaacgtttggttgccgttatgataatcaagtactagctggattatatccaaattaaattcatgtaatgttttgctattgttaaataaaatgttcattccatcttctgaattagacatattttcgaccatttgttgtttgcccaaaatactgttgacagtattactagttatatatagggatttagctaagtaaactagttcggttagaacttgctttaactgtttgaaattaccgggccaattatattgtgagagagcagtcagggcactaggctcgtaacctacaatatccgtattgttttcaatatttaccttatttaaaaacatcgttaatatagccgatagttcatttcttctttctcttagtggaggtagaagaaaacttatcgaattcattcggctcattaattctttataaaattctgatgtgcgaccttccgatgttttttcgcaaataaagatgagtcggttatttacgtgtaagttagtatattcaataatagtgagtaacttttcaaagttttcatgtgaaattttatcaaaacgattaaactggattgtattaccatattcaagaaaaggaccgttatttgtatttaaaaggtgtttccacatggcatcatttagtaagtgcgaattaatagctactaatgtatgattgttatttttctgactggtgaatacacattgagatacgatatctttccccgtacctctttctcctaataatataatcggcgaattatttgaattcatttgtttaattttattgttaatatcatctgtgataatcggatttttatataaattattatttaattttttttctacttctgacttatcttcatatgtaacaccaaatttagaattcatgataggtgttacagatttttgcacaataacaatataaaaaacatcatttttctcttttgaacgatttacttttaagttatatacagtgttgtttactgaatgataaaaagtatgtgattgagtaaatgaggtcgtctcttttttattaagcaaataattatagattgaggcattcgtttcggaatctaaacttgaataaatcaactcaaactgactggataaaattaaacagtcagttttaaatttttcaatggcttctgtaagtaagttattttgtaattttaatttttgaaggtgcatatttaactctattgcttgttcataagtacgtttaatactttcacttcctgatgtaataagaatcgtatttaaagaaatttctagtgcgagtttgttcgttattgcatcacaaagcactaattcaatcccttttttctccaatgactttagtagacctaaatgatcactagaatcatcaatggtgtatatttccacagaatagtctaatatgtcacaaattaaatgagctgtttcagtaatactcgaataacctacaatagcaaatttagaggtatagttctttgctagtttgatcgctcctaaaatgtcatatacggatatcgaaacatctataacgggtatagagatattcttcctgattaagtcagcagtacctccccttgatataacaatatcataatcgttatgaatcatctccaaggccaggttttttccttcatgtaaatcaccagtatacgtatttagtgaaatattagaaaatatggatcctacattttccattgagtgtcttaactcttcataaggtgcgataccaaggatttttgttatgtgttgcaaagttatccccccccgaatgtttcatttttaaacaatttatcactaattcctgaaaaatgatagcgttttctttgctatagtttcaaaatgtaacaataataataattatcagatttttttatgcgcagtatcaccttataatttaattatcaagcactaaggtggtgaacaaatggtaagggtactaataatggctgatgattttacgggagcacttgatacgggtgttcagttctctaattacggtgttcatactttagtgacttctgatttagagtttgaattttgggaaactacagatcaaatagaggtactggtttttaatactgaaacaagatatttgaataaatgtgaagcatacgaagtgattaagaagatagccataaaagccaaagatgaaaatattcaatatatatttaaaaaagttgattcagcattaagaggaaatgttgcttctgagttaagagccttgagtgatgtcttcgaagatgtaaccattccttttattccggcgtacccagaacaaaaccgctttagtttcgaaggaatcttatatatagattcaataccagtaagtaaaagtgtttttggacaagatccatacgaaccggtcacggaaagtcatatcccatctcttctacttaaagaagcagatttaaaaacgtctattacaaaaaaatataaaattccaccaaaagaagaaagaattttgttaatggaaagtcactccgatgaggagatgctatctcaagggcatgagctattaatgaacgatgcattaaacataacggcggggtgtgcagggtttggtaaagcattagcaaatatcatctataataaaagaactataactcaaaatgatattaacttcccgttattaatagtatgtggaagcgtgaacccagtaacaaaaaaacaaattgcatttgccgaaaataacgggtttgatagaatctcgttaacgatggagcaactttgtgataaacaatattgggatacagtaaaagggcaagaagatatgaatcaatatttaaaaatggaccaacctttaatgtttgaaacatatgggaatatattggcagataaagtgaatggagtacccgaagaaagaactgaactaaggtttagaattgggcagtctctcggatacttagtaaagaatcttatgttaagtgacattaatagaactttattatttaccggaggagatactttatatcaatcaatgagagtattagggattaacgaaattaaacctctgaaagaattattcccaggaattgttcttggaagtatcgattttgaagataaaaaacattatatcattacaaagtctggcggattgggtaatgaagatctatttattaaattaaatgaattgattcgtaacaaaggagatgcatattatgttaaatcaatataatttaaaaatgccaaccaatgtatttgcaggtccagatgccatgcaaaacctagatacaattattaaagatggtgtaaaaaaaatcacgatatttacaggtaacgaaatattcaagcttggattgctagacgaagttatcagtattatagaaaaaaataatatcgagtacgaaatcttatctgatattccaacagagccatcttacacggaagctcaaaaggttattgaccaatttaaagcattgaactctgattttatcattggggtcggtggtggaagtgttatggacattgccaaattagcatcagtgttatccactgatgattatacggtaaaagatttactcgagaacccgttattagctaaaaaacaagtatcatcattaatgattcccaccacagccggtacaggctctgaagcaactcctaatagcattgtaggagtacctgaaaaaaacttaaaagttgggattgtaaatggtgaattgattgctgaccatgtgattttagaaagcaacatgattaaaaatttgccgaaatctattgctgcagcaacaggtattgatgctctagctcatgctatcgaatgttttacttcaaaaaaagcaaatccaatcagtgatacgtttgcactagaggcactagatttaatcttaaataacattattgaagcttgcacaaatccagatgcgcttgaagctaagcgtaagatgttattaggttctttctatgctggggtagcgattacttcctcaggaactactgcggttcatgcattgtcttatcctttaggtggaaaatatcacattgctcatggtgtttctaatgccattctactaacaccagttatgaaatttaatgagcccgttattaaagaacttttggctaaagcatatgatcgagttgtaaaagaaacaaatgaagaactaactgtaaatgaaaaatcaaaatatatcatcgatttattagaaaacatagtggaaacacttgaaattccaactagtttaaaagcttttaatgtacctaaggaagatctagaagcattagtagaggctggaatggaagttcaaagactacttgtcaataatatgagagaagtaacaccagacgatgctcgtaaaatttatctagaaattatgtaggagtgattagtttgcaaaacaaattaaaaggaattatcacaccaattgttacacctatgtttgacaatgaagaagtgaactatgaagaactcgtaaatcaagtaaatagagttattgagaatggtgttcacggtatttttacgttcggtactaatggagaaggctatattttaagcgaagaagaaaaagtgcatgttatggaaacagtagttgatatagtagcggacagggttccagtctatgcatcaacagggttagttggaacacaagataccattcgcttatctttagaagcaaagcgtgttggggtagactatctatcaatcattacaccgtattttgcagcagcaacccaagaagagatttatacgcattttaaaacagttgctgaagcggttgatatgcctattgttttatacaatattccagctcgaacaggcaatatgattcaacctgcgactgttgaaaaactaagtcatattgacaatatcgtaggagtcaaagatagtagcggaaactttgataatattcttcaatatatcgaaagaacaagaaatagagaagatttctctgtgctatcagggaatgattcattaatattatggacgttacttgctgggggaacaggtggtattgcgggatgttcgaatgtatatccgtttactatggcgcaaatatacgaacaatttgtaaagggtaacattgaagaatcccgtaactatcaagattctatcagaagttttagagattgttttaaatttgcaaatccaaatactgtggtaaaaatggctgttgaactactcggttatccggttgggaaatgccgtgcaccattcaatcaagtgtccgctgaaggaattgcagcattaaaatctgtattaaatgaaaatattgaagcaggaatgaaatagttaggaggggcatcatgaaaaaaattattggaatcacaatgggggatcccgcaggtattgggcctgagatctcaatcaaagcttttcaaaagaaaagcttatatgaaaaatgtaaccccttactcgttggagacaaaagtattgtagagagttatttagagaaatacccagagtttaatatgaaggtaaatgctattactacaccagaagatggattgtatgaatggggaacaatggatgttattgacctagcctctgtagatgcagataagttaaaaattggggaagtatctaaagaagctggaaatgcggcatatctctatgtggaaaaagtcatagacttagcgcttaaggggaaagtagatgcgaccgttacgaatccattaaataaagaagcgttaaacttagcgggacaccactttgctggtcatactgaaatttacggagaacttacaaatactaataaattttctatgatgttagctgatggtgatttaagagtggttcacgtttcaacacatgtttctttaagggaagcttgtgatttagttaaaaaagagagagtactagatgtcataaaaattgctcatcaagcctgtgtaaaattgggcatcgaaaatccgcggattgctgtagcgggtttaaatccacactgtggagaaaatggattatttggtacagaagaaattgatgagattatccctgctattgaagtagctaaaaatcaagggattaatgccattggacctttaccagcagatacagtattctcaaaagctcgtggtggaatgtatgatattgttgtggtcatgtaccatgatcaaggacatattccattaaaactattagggtttgtatttgatagggaacaaaataaatggaaagaagtttctggagttaatattacattgggattaccaattatccgaacctcagttgatcatggaacagcatttgatcaagcaggtagtatgactgcgagtgaaattagtcttgaaaatgcaattgattatggggtacagctagcaaataatgttgatttagaagcgaagggactggtgtaatagttaatttaatcatttcaatcaatataaataattaaagctaacaatccctaatgatttagagaaagtaaacgaagttgaaatagatgataatacgagcttaactttgatggtggttatttcttttaagaaggaatgaccacttatatagatgaagagcaattcaaattgttttagacggttttgtagcctggcattaagtaataaatgagtagttgctgttgaatataattttggggaaatgtagttccattacacggcggtctgcaaggaacaggaaaattaataaaggtagggcctatgtgtgtctgcctaacgctgagcatgaagcggtaattaagataaaaatttcaatagaaagataaggtgatgagagtgattagaatgagtaataacaagatagtgattaatgagtccattccaaacggtaaattatatcatgatgtttatacaaatattgatttttctttaattccatccggtcctttcccaaccgcacatgccccaactattactaagttagacaatggagatttattatgtgcatggtttgcaggctcatttgagggaagccctgatatttcaattgtattatcaaaatttaatcatgaatctcaagagtggaatgagccggaaattgtctcgcaggatgacacacgtagcgagcaaaacccatcattttttcacgcacctgatcaatcggtgtggttaatctatacttcccaagaaggtcgacaaccagataaagataatatgcagtttacgtccattattaaatatcagaaaacttacgacaatggcgaaagctggactgaaccagaagtattatttagccagcctggtacatttgtacgacaatcgattcaagtattaagaaatggtagatggatttttagcacgtgggtatgtgaagattccgagttaggtcttacaaacgatcctacagtatttcaactatcagatgatgaaggacaaacatggaaagaagtacgcatgcctgaaagtaacggaagagtacatgccaatgttatcgaattagaagatgatcatttagtggcatttatgagaagtaggtttgcagattatatttatagaagcgagtcaaaggataacggagattcttggacagtgcctcagcaaacaactctaccaaataataatgcaagtatcagtgcaatcaaacttcataacgatgcaattgccatcgcttataatgcaaacgctaccaataatcctgaagttggtaaggtagcatggcctggattaagaaacccagttgtagtttcagtgtctgaagatggcggaaatacttggccacttggtcgaattattgaacacgcagaaggtttcattggagcagagaacaaaacgaataattcacaatttgaatatcctacaatttatcaagatacggaaggacttttacatttagtatatgcgtataagaatagactatgtgtgaaatatactagtttttcagtagcagatatatatggtgacaaacgcgaaaatgagagtgtttacaatcctacatctggagaaatcggttaggtagtaaggcattacattattctttttaaccgtctcattcataaatacgggctatatatgatagtaaaatgtcatccccctaagagagaggagatataaaaaatgacaatggaaatgattcttgcactaggtattctggttctgatgattgtaatgattatgtcagataaatttgcctttggcgcaccaccaatcctggcctgtcttttgttagtagtctgtggtctgtccactgttcaagaggctttcgcaggttttgtgaacccaagcgttattatggtcgctggctttatggttgttatggcgggcctcatgaagactagcctaattggtagggttcagtcctcaatgctcgctttggtaaataggggcggttataagagttatgttcttttgattgtggtcattatgcttggtgccagttttcctggtgccggtgccactggttactatgtactgatcttatctttgatatctactattccttacaataaaaaaatgccaacgtccaagctgatgatgcctttgggttttgctactaatcaccctttagttccttttaatgtagcactcttctatggggttactgttagcgtactcgaaacggcaggttataccggtggactgtctatgtcaaaatttgctgtagtgaatttcatcttggctcttggtttcttggcatgggccttgattgcgtatcgcctcctaccggatcatccaataacggaagcagaagcttctggatttgatgaggtggcagctacgactgagatggggactatgcctgcatggaaagaatacagcactatcgttgcatttatggtcagtgttgttggaatgatgcttatgaatgtattaggcaatgctgcctttgtcatccctggtcttatgggagcatttttactaatcatcaatgtgcttgactttagggaagttcgagataatatggttgcacctgtaattattatgatggctggtgttatcggcgttgctgacgctttagccaactctggatttacagctatgattggagatactgtggcgaatgcattgggtaccaacatcaatccattcctgcttatctttatcttcgccattctaactagtacttgtgctacttttactggttcaaatatgggttctgtatacatctttgccccgatcgctattgcaaccagcattagtttgggactgaatcctgctgctgccgcaattgcagttgtagtatctggatggaacggcggattcatgccaatcgatggtatgccagctatgattttaggtatgggtagatataaacttccacagttttggttgttctcagtacctatgtacctaattcgtatctttgctctatgtgtaggtgctatcgttatgttccctgtaagctaataaagtaaaaggagaaacaagttggataaatggagacaggctgcagaacttaaaaatatattagagatggttctccttcctttgtcattcctagagagcagtagcgtcaatagaaccttaaaacaaagccgatggagtaatccatcggctttgtttgcaaatcatgatgctaagcaataattttacctaaacggtggaaaaggtcttgtattattaggacaattgcaactcttgcagttgtgtggcttttgaaaatagtagggttacattgagtagggagccttttttaaattattaccgctagtaattgaaagtttcttataaaatatggggaggaaagttgtatggaaaaacagttacctaaagtaaaaccgttatgtccaccaggtcgttcgccaagatacgaagatgttccctttgcggaggtaaccttggataatggggacccatacactctgaaaatggatatctatcaagatcttaatcaaaaaacgccgggtccatgtattatttactatttcggagggggatggatgtatggggaatataagcaggtcactcaaaaagcagtatattttcgggaacttataaggttggtcgagcaaggatttactgttgtatctccagcttatcgtttggctagtcagtctgtttttccagcgtgtatccatgactgcaagggagttgtacgatttttaaaggcgaattcaaagttataccatatcgatcctgaacggattggagtattggggaactctgccggtggacacctagccgcaatggtcgcaatgagcgcaaattgcagtgaaatggaaggcgatgtcggtggtaaccaagaatatacgagtgcagtaagggcagcaaccattttttatgctccagccgacctagtagcactcctcagaaacgacgcaaatgaagcaataaagaatttgtctggcacagaagtcgataatgcaggcaaatccatggataatgtgataaccgaaattcttggatatactgaacctggcaaatcgttaatagacctgaatcaattgctagagagtggggatacggaagatttagattggaaatatatagagttggcgaaaaggtgtagtcctattagttatgtaagtgccaattgtccaccgatgatgattttgcacggtgggaaagatcctctcgttcctattgaccaaagcgaaagtctttataaagctctagtatcttctaatgcggatgcgatgtatttttcgttttcccaggcaaatcatggtccaacgatgggagatgaagctgatcaagtggcatatcagttcttgaaaaacagattgtaaagaaaaaatatataatcctgcgttaatcatgagaacggttttggtgcctggtcagagagctgaggaaacaagaatatgatgaatggaaacttcggcatgagcttggagttcactgagtgaagtgaagtcaaaagatatctttcagaaattcatgaaaggagatctttctgagagggtgcgcgtttaatattaattaactggatgggggtgtgctgatgttattggaagggaaagtcgcaattgtatcaggttctagtagaggcattggaaagagtattgctttaacgttagcgaaaaacggtgcctccctcgtcatcattgggacaaacaccaagttattgaccgaggtggctaacgaagttcaatccatgggaaggcagtgtgctgttcatttaggggatgtaacaaatccagaaacagcgacattggcagctgagaagacgatgagtctttttaataaaattgatattttagttaataatgctggcataaatatgcgcagttccacgttagatctgaaattggatgattggcaaaaagttctggatgtcaatttgaatgggaatttatattttagcaaagctgttttgccttatatgattgagagaaattatgggaaaattgtaaacgtcagttcctctactgctaaatcaggtcataaaaatgctgccccttcctatggagcctctaaggcaggagttgattacttgacgagacacctcgccttggagatgtcaggacataacatctatgttaatggagtttcacctgggcctatcgaaacagacatgattaaacagtggactgaggagtatcaccaaaatgtaatttcaaatgtccctcttaagaaattaggtactccacaaaatgttgccgatgtagtgttatttttggcttcatcaatgtctgactttatcactggtgaaacaattaatgttaatggtggtacatacatgaattagacagaattatgaggtcaaatctgttatttagatcgaagcaatataaaaggtctgtcaagaagtgtgtttgacgacctttttttgcgtgcattaatattttcagatttttttaaaatttgttaagatagtactatgtttattgaaaaacatactaaactcaaggcttaactgagttttaagggggagctttattgattcagctggatcatattaataataaattaaaccaagtattagaaaacatcgatcacattgtgattggaaagcgtcaggtatctacgttgagtttggttgctttgcttgcagaggggcatattttgcttgaagatgtgccgggtgtggggaaaacgatgctcgtgaaggcactggccaaatcaattgatgcagaatttaaacgaattcaattcacgcctgatttgctgccatccgacgtaacaggcgtttctatctacagtccgaaagacatggaatttcattttcgtccaggtcctatcatgagccatattgtactcgctgatgagattaacaggacttctcctaaaacacaatcggcgcttttagaagcaatggctgagcatcatgtaacaaccgatggtatcacccgggaaattccagcgcctttttttgtgatggctactcaaaatcctgttgattttgatgggacctatcatttgccggaagcgcagctggatcgttttttattcaaattaagcatgggatatcctacgcaagaagaggagcttcaaattttaaatggcgtatccacccagatcaatcttgaagatgtcaaacccgtcatgagcattccagaattagtacaggctcaaaaagctgtaagcagtatttatgtagatgatgcgatcaagcactatatcattgaaatcattcgcaaaacgcgctctcatccacatgtttcgttaggtattagtcctcgtgggacggtttcatttatgaaggccgttcaagcatatgctttagtgaagggaagagattactgtcttcctgatgatgttcaagagcttgcttcgtatgtgtgtgcacatcgattaacgctaagacctgatacccagtacagcggcttaacagcgggtgatgtgatgaagcaaattatggctgatacgaaagtacctgttaaaaggtaagaggtactttatgaaacagtatataaaagtcatatggaataaatgtagagactggttcgttttattctgcatctttgctgctacgttttcgtacgcgatgtttcaagggggctttgtcagctggtttttattttatagcttcttaccttttggattatatgcggcagcagttttgctttatccgttaaagaagtggaatgttactcgtgatgtgaagctacagcctcgattcgctggagatcatctttcgtatgacattcacattacacgctcctcgggttttcctgtttatatggcagcagtgaaagaggagagtaaccttttagatcaagaagaaagaacaatttatccgctttttcaacgaaacgctattattccgtatgaaagatcgtttgtagaaagaggagaatatgaattttttacgctttcgattgaattgagtgatttattaggaattgtaaaaaagaaggcctattatccgctgcagcagcggtttatcgtgtatcctcaaatccatgagatagatatcccgtttcttttagcaggaatagaagaagggaaaaatgaagtttccgctggaaatcaatctactacgttagtgacaggcattagagaataccagccgggtgaccgattaggatctatcgattggaaggcgacggctcgtaaagctacgttgatttctaaagagttcggtcattatcatgaacggagtatgattatcattgcagatgttatcagctctctatactttgaagaacgaatgagctttctggcatccatgctcattcatgaagaaaccaagcgtaaaaaaatcgattttcttttagctggagatgcacttttttcaccaaaagcctctgaacaaagtgagactgataacctgttgtatcacttagcgcgtgcacagcctattaacaaccgagtattcgaaacagaatttaagggtattgccattcaaaagcagcattcttttatggtcattgtcagtcaagttacaggaactctcattgggcaggttcaatctaagctgagtctgcatgctaaggcatcaataattgtcgttaaagatgaaggagcagggcttagtgacgaagagacggttattgttaatggaatacaatcttctgctttaacgattgaagtcgttaatattcctcttcctctatcatctaaaggaagtgagggcggaaataagtgaataaatcagctttgtatgtaaaaaacatcttattgtacgcgggagcattctttttattagtggaatggcttcttcctttaaatgaagtgacggataccaatcaaattcagtactttatcttgtttgttgcttactgttttttgtgtttaacgtttcgattgccgtttattgtgatgacgttagggagtatattgtttattttgttttcgcttcacaatctctatttccaaggagctttcttttcttcagactggcttccgagacttttggagattcttcagtcagatgcacaaagtatcatggagtgggatatagcgaatttatcatttgaaatgaggagcactttattttttgtgctgctttggattatggcttatttaattcgatattggatcttttatcaaaaaagaattttcttctttttcttcttaaccattttgtatattaccgtgttggataccttttctacttacgatgcgagagctgctattattcgtgtgacgattatcggatttttattagtagccatgcttcgcataaatcctgaacgcataaaagctgcgggcactgagcgtttagaaaatagaaaacgatcgtttctttttctaggcagctttttagctatcgtcattgtgctggcttatctcgctcctaaaccagggccgcagtggccagatcccgtaccttttatcacagcgcatacaacaaatcaaggacagggagaatctgcaagcggtcaacgaattggctatgatatggacgattctaaattggggggatcgtttgtcaatgatgatacggttgtgtttacagccaaagtagaggatgagcactattggcgtattgaaacgaaggatgtttatacaggtaaggggtgggagctgtctaaagaggaagaaaaattaccctttaaaggaaatgaaaacttactccctcaatatgactcaagtgtagcaggacaagtaagaaaagcagaagttacctattcgcagccttctgttcatcttatgcatgttcctcaactgctgtcgctaaccttaaaaaatggcattcaaaccgatgttacaccgacaaatgaaaaattatatccttatcaaaatgacaagcttgttactgttcaatcgtatgagatgacgtataaatatcctgtatttgatattggacttcttcagcaagcagaggaaaaaaaggcagagagtttagagaataataacgaatttatagcaaggtatacacaacttcctgctaacttgccgaaacgagtaaaggatttagctcgtgaggtaacaaaaaataagaacaatcgttatgaaaaagcgaaagccgttgaagaatacttccgatcaaatccatatgtatatgatactgaaaatgttccaattcctacgaaaaataaagattatgtggatcaatttttatttgatacaaaaagagggtactgtgataacttctctacttctatggttgtactgcttcgatcattagatattcctgctcggtgggtaaagggctatacagaaggtgatgccaccgtcatttcaggaagtagtaagtggacaacctatgaaatcacacaaaataatgctcattcttgggtcgaagtctattttccaggagcgggttgggtaccttttgaaccaacaaaaagtttttctaatccttatgattttgtagatagccaacctaacaactctagtgaaaatagtcaaagggaagaagagaaacaagaaacgcaagtgaaggagcagcctaaggaaaaagagcttccggcacaagaagaaagagcgaaagaaaaaacagcttctcttcaaaatgctaagttgtctatgaagtggaaagtgcttttctgcggactgattgtagttatgttgatagtaatatatctcaatcgatttaaatggtttttacctttttatatctctttttataaaaagaaagagagtgtggaaacctttgaatcagcgtatgcttttttacttaaaagactcgctgcaaatggactaaagcggcaagaaagtcagacgctgcgcgactttgcaggagaagtagatgaaaaattaaatacggtaaatatgctaaaattaacggaaaaatatgagcgggttttgtatcgaaatgcagattccataaaagaatggaaagagtcgattgaattgtgggaaaatttaatcaaaaaaacgagttcttgaccattgtttcgcggattgatagaatattctcgaacttactataaatgtttcgtataccttcatatatcctcgataatatggttcgagagtctctaccgggtcaccttaaacgatctgactatgaaggcagaacagtctatttgacgataaacgtcgtgctcaactagacttctgcctttgttttttgagggagaagtctagttttttttatattttagggcataataacaagtgattatttacacattcggagaggtgaacaagatggaaggcatgattgttgtattagattttggtagtcaatataaccaactgattacgcgtcgcattcgcgagttcggagtatatagtgaattgcatccgcacacaattacagcagaagagattaaagcattaaatccaaagggaattattttctctggaggcccaaacagtgtgtacggtgaaaacgcatttcactgcgatgaaaacatttttgaattaggtattcctgttttaggtatttgttatggaatgcaattaatgactcatcattttggcgggaaggtagaaggtgctagccatcgtgaatatggtaaagcagcgattaacgtacaaaacgattcattaatgtaccatgagttgccaaaagaacaagttgtttggatgagtcacggtgatttagttgtagaaacacctgctggttttgaagtggacgcaactagcccatcttgtccaattgccgcaatgagtaacaaagaaaagaatatgtacggagtacagttccatccagaagttcgccattcagtgcacggtaaccatatcttaaagaacttcgtgtttgaagtatgtcatgctgaagcaaactggtcaatcgagaacttcattgaagttgaaatggataaaatccgtgaaacagttggagatagaaaagtactttgcgcacttagcggtggagtagactcttcagtagtagctgtgttaattcacaaagcaattggtgatcagttaacatgtatgttcgtagatcacggtttattacgtaaaggtgaagcggaaagcgtaatggaaacatttagcgaaggctttaatatgaatgtaattaaaatcgatgcaaaagatcgcttcttagaaaaattaaacggcgtatcagatcctgaacaaaagcgtaaaatcatcggtaatgaatttatttatgtattcgatgacgaagctgctaaattaaaagggtttgatttcctagctcaaggtacgctatacacagatattatcgagagtgggacagctacagctcaaacgatcaaatctcaccacaacgtaggtggattaccggaagatatgcagttcaaactaatcgaaccgttaaacacgctattcaaagatgaagtacgtgcattaggttctgaattaggtattcctgacaacatcgtttggcgtcaacctttcccaggaccaggtctaggtattcgtgtacttggtgcaattacggaagagaagttagaaattgtacgtgagtcggatgctattttacgtgaagagattgcaaaagctgacttagagcgcgatatctggcaatactttacggttcttcctgacatccgcagtgtaggcgtaatgggagatgctcgtacgtatgattacacaatcggtattcgtgctgttacatcgattgatggtatgacttctgactgggcgcgtattccttgggatgtgcttgaagttatctcaacgcgtattgtaaacgaagttaagcatattaaccgcgtagtgtatgatattacaagtaagccacctgcaacgattgaatgggaataatatgtaagaaaaccgaacaaacgaacattcttttctaagaatgttcgttttttgttgacttttttaaaaagttaatggtaggatagtaacataaaacagcgagatatagctttaatgtcgtataatcttggggataaggcccaaaagtttctaccgagctaccgtaaatggcttgactacgagaaagtaatacatgtatgtgtaaaaattttttgtttttttggctcatacatttctcttttagtcgatcttatgcctttacgcgcctagtgtagaggcattttttatggcttgccaagtgcatgcggcttctataaagggaggaaaaaacgtgaagaagtattttcgttttgaagagctgggtactagctatcgaaaagagtttatagcgggccttacaacttttctatctatggcttacattttatttgttaatccatctgtgctatcactaagtgatgtaaaggatctgcctgacagtatgagaatggaccaaggggctgtatttacagctactgctttagcggcagctttgggatcaattgttatgggagtccttggtaggtatccaatttcattagctccaggtatgggattaaacgcattttttgcttatacagttgttctgacaatgggaattccatggcagacggctttaacgggtgttatgatatcaggtgttatttttattcttttaacattaacaagcctgcgagaaaaaattattaattctattcctattgaattaaaaatggctgttggagcaggtattggtttatttattagttttattggtatgaaaggtgccggaatcatcgtcaaagatgatgccacatttgttggactgggtgatttaactaacccaacaacgttacttgcggtttttggcattgtcattactattgtattaatggtgcttcgagtaaatgcagctgtatttatcggtatgattgtaacagctgtagcgggtatggcttttggtttaattgatacacctaaagcagttgtttcatcagttcctagtcttgacccgacgtttggggcagcttttcaaaatatcggtgatatctttactgtaaagatgctagtcgtcattttaactttcttatttgttgatttcttcgatacagcaggtacgatggttgctgtagcgagtcaagctgggcttatgaaagataataagcttccgcgagcgggcagagcgttattggcagattctagtgcgattgtagttggtgctgttcttggtacctcatcaacaacagcttatgtagagtctacggctggagtagcagcgggcggacgttcagggtttactgcaatcgtaacggcggcgtttttcttaattgcactgttcttttctccattgttagcggtcgtgacaccagctgttactgcgcccgctttaattacggtaggagctctgatggtgtcaaatttaggggaaattaattggaaagagttcgaagtagcagttcctgcatttttcacggtaattatgatgccattaacatacagtattgcaacaggtattgcggttggttttatcttttatcctattacaatgttatgcagcaagcgtggaaaagaagttcatccaattatgtatgctctctgtatcatcttcatactctattttgcattcttagcagaatagtttaaataaaaaagctcagtttaatgactgggctttttttttatggtaagataagaaaactgcatagcggctagattgctattgtaatagagagtattcaatcattttactgaaggtttacttcattaatttttttatttataaagttttttagaaaaacgattgactctatatattatatatggtaaattattaaatgtcgctgatgaacagcgcagttgagagaaacatcttaaaaaaagatgttgacatcaaaagggtagaatgttatactaataaagttgcttcagagcaacggttgaactttgaaaactgaacaaagcgacaaacgtcaacgttaaattttattttttaattgagcaagtcaaacatttcttcggagagtttgatcctggctcaggatgaacgctggcggcgtgcctaatacatgcaagtcgagcgaactgattagaagcttgcttctatgacgttagcggcggannnnnnnnnnnnnnnnnnnnnnnnnnnnnnnnnnnnnnnnnnnnnnnnnnnnnnnnnnnnnnnnnnnnnnnnnnnnnnnnnnnnnnnnnnnnnnnnnnnncctccccgccgtttgagtaatggggggacgcagtaggatagggtaagcgcgctgctggatatgcgcgttcaagcagttaggctgatgagtaggcaaatccgctcatcatgaaagctgagctgtgatgacgagggaattatagtaccgaagttcctgattccacactgccaagaaaagcctctagcgaggcgggaggtgcccgtaccgcaaaccgacacagggatattcctgtaccacctccccgccgtttgagtaatggggggacgcagtaggatagggtaagcgcgctgctggatatgcgcgttcaagcagttaggctgatgagtaggcaaatccgctcatcatgaaagctgagctgtgatgaaatccgctcatcatgaaagctgagctgtgatgacgagggaattatagtaccgaagttcctgattccacactgccaagaaaagcctctagcgaggcgggaggtgcccgtaccgcaaaccgacacagggaggcgaggagagaatcctnnnnnnnnnnnnnnnnnnnnnnnnnnnnnnnnnnnnnnnnnnnnnnnnnnnnnnnnnnnnnnnnnnnnnnnnnnnnnnnnnnnnnnnnnnnnnnnnnnnncaagatgagatttcccatagcgcaagctagtaagatccctgaaagatgatcaggttgataggtcagaggtggaagcgtggcgacatgtgtagctgactgatactaatcgatcgaggacttaaccaaatttttaaaagcgtaagctttactcagcaaacagttatctagttttgagagaacaatctcttgtctggtggcgatagcgaagaggtcacacccgttcccataccgaacacggaagttaagctctttagcgccaatggtagttgggactttgtccctgtgagagtaggacgttgccaggctggaaaagatctctcttttctttcgaaaaagttgttgacattacgttgataacttgataagatagtaaagtcgcttaagagcggcggttgaactttgaaaactgaacaaagcgacaaacgtcaacgttaaattttattttttaattgagcaagtcaaacatttcttcggagagtttgatcctggctcaggatgaacgctggcggcgtgcctaatacatgcaagtcgagcgaactgattagaagcttgcttctatgacgttagcggcggacaagatgagatttcccatagcgcaagctagtaagatccctgaaagatgatcaggttgataggtcagaggtggaagcgtggcgacatgtgtagctgactgatactaatcgatcgaggacttaaccaaactttaaaagcgtaagctttactcagcgaactgttatctagttttgagagagcaatctcttgtctggtggcgatagcgaagaggtcacacccgttcccataccgaacacggaagttaagctctttagcgccaatggtagttgggactttgtccctgtgagagtaggacgttgccaggcaaataaaaagactagtcattcaatgactagtcttttttgtttctaaaaattacagcgtgaatttaacttttaaattatgttacactatagtggattcatttaattttttattataaaagttctttttgacgttgtaagaaacttctttcaaactggaggctgcattttgggtaagaaatcaaaaaaagtactatacgaattacaagaaaatgaaacaatcgcaagttgtttagatcggatgaaaaaagatgggtatatgcccgttcgacgcatggaaaagcctatctttgaagaaaaagaaataaatggtaaaaaagagtatgttccggtaaagcaacagattgttttcgaagggaaaagtctctaaatacgaacattttaatgataaaaatagtaaatattcgatttttaggttgacttttttccggtttggctgttattattaagttgtcaattgagatatccgaaacctcatataatagtgggaatatggcccacgagtttctacccgatgaccgtaaatcattggactatgaggagagtacaattactaaataggtaaacatgattccttttcaaaaggaatgttgatacatgaaacctagggtagttgtggctttcctttagtgagccataactttaccctaggtttttttataacgtgaaaaaggagcttttattcatgaatgtaaaagttgctgttgtaatgggcagtcagtcagactggagcactatgaaatatgcgtgtgacattttagatgaattaaatattgaatatgaaaagaaagttgtatcagcacatcgaacgccggattatatgtttgagtacgctgaaactgctaaagaacgagggattaaagttatgattgctggcgctggtggcgctgctcacttacctggtatgattgctgcaaaaacaattttacctgtaataggtgtaccggttaaatcaagtaacttaaacggtttagattcacttttatcgattgttcaaatgccaggcggcgtaccggtagctacagtagctattggaaaagctggttctacgaacgctggcctgctagcagcacaaatcttagcaacacaggatccaatgttaagtgatcaacttgaaaatcgtagagagtctattaaatcatccgtgttagaaagtagtgatcaacttgtctaatttacttatacctcctggtaaaacaattggaatcgtaggcggtggacagctaggaagaatgattgcactatctgctaaagaaatgggttattacattgcagtgcttgaaccaacagaagattctccttgcggtcaagtagcagatattaaagtcattggcaactatgatgatagaaaagcggttgaacagcttgctgaagtgtcagatgtcatcacctatgaatttgaaaacgttgatgttgagatgatgaaatggctagaaacaaaatgctacgtgccacaaggcagtcatttactagccgttacacaaaatcgtcgtttagaaaaagaaatgattacaaagcttaatctagacgttcctgattacgcaatcgttacgactgaagaagaacttttaaaagctgtcgaaacaattggttatccatgtgtcgtaaaaacttgccgaggcggatatgacggtaaagggcaagttctagtgaaaaatgagaataatattcgtgaagcagctgagctattagcacagtcggaatgcattgtagaacagtggatgaacttagataaagaagtatcagttattgtacaccgcaatgcaaaaggcgaaacggtatgtttaccagtagctgagaacattcataagcatcatattttgcaccaaacgattgttccggcacgtattacagcagaccaagaagcgaaagctcttcaatatgcgcaagaaatagcaaaaggattagatttagttggcacattagcagttgagatgttcctaactgaagaaggtcagctttatataaatgaaatggcacctagacctcataattcaggtcattattcaatcaatgcttgtgatctttctcaatttcagcagcatgtaagagccatttgtaactggaccctagcacaaccgactttattaaaacctgctgttatggttaacctattaggggaacatattgagaacacaatggcaaaaatcgaatgtttagatgatatgcacttgcatttgtacggaaaaaaagttgcaaaagagaagagaaaaatgggacatatcacggtattagctgataagatagatgaggcgatagaaaaagccgaatctctaggaatttgggaaagaacggaggaagtaacaacatgattgaacgttatacaagaccagaaatggcagctatttggacagaagaaaataaatttaaagcttggttagaagttgaaattctagcttgcgaagcatggtcagaattaggacatattccgaaagaagatgtaaagttaattcgtcaaaatgcatcttttgatattaaccgcatcaatgaaattgaactagaaacgcgtcatgacgtagtagctttcactcgtgcagtatctgaaacgcttggtgaagagcgcaagtgggtacactacggtttgacttcaactgacgtagttgatacagctctatcttatttattaaagcaagctaatgaaatcttgctaagtgacttagagcgctttgtagaagtactaaaggaaaaagctcaagaacataagtatacggttatgatgggacgcacgcacggtgtacacgctgagccaacgacatttggtttgaaaatgggattatggtacgaagaaatgaagcgtaacctagagcgtttaaaacgtgctgcagctgaagtggaattcggtaaaatgtcaggagcagttggaacgttcgctaacatcgatcctttcgttgaaaaatacgtatgtgagaaattaggaatttcaccagcaccaatctctacgcaaacattacagcgtgaccgtcatgcacactatatgtcagtactagcgttaattgcgacatctattgagaaatttgcagtagaagttcgcggtcttcaaaagagtgaaacacgtgaggttgaagagtactttgcaaaaggtcaaaaaggttcatctgcaatgcctcataaacgtaacccaatcggttctgagaacgtaacgggacttgctcgcttaattcgcggctatatggttacagcttatgataatgtaccgctttggcatgagcgtgacatctctcattcatcggcagagcgtgtcatcttacctgatgcaacgattgctttaaattacatgttaaatcgttttgcaaacattgttaaaaacttaacagtattccctgacaacatgaagcgcaacatggatcgtacactaggattaatttactcacagcgtgtactgttaacactaatcaataaaggcatggtacgcgaagaagcatacgacttagtacagccaaaagcaatggaagcatgggaaacgcaagttcctttccgttctttaattgaaggcgaagagcgcattactcgccacttatcaccagaagagattgaagattgcttcgatcataagcaccatttaaaaaatgtagatatgatttttgaacgtttaggtctttaataaaaaaggcaaggcacgtccttgcctttatctaagaaagtgtatctgaatattctgtatgtagaggtgacagcatggaaaagcaagagttactttatgaaggaaaagcgaaaaaaatttacgctactgatgagcaagatgtattgtgggttgcttataaaaatgaagctacagcattcaacggtcagaaaaaagcggagattagcggaaaagcacagttgaacaatcaaattagtagtttactattttcaatgttacatgagcaagggattacaactcactttgtgaagcagctttcagatcatgaacaagcggttaagaaagtagaaattgtcccgcttgaagttgttgtacgaaatgctacagcaggaagccttgcgaagcgaattggcgtagaagaaggtattcgttttgaacagccaatcgttgaactttactacaaagatgatgcgcttggtgatccattaattcttgcagaacatgcgattttccttaaagctgcaactcaagaagagattgatagtttaaaggcacaagcacttcaaatcaacgaaatattatcgaaatttttcaaagataaagatattttcttagtggattttaaattagaattcggccgtacttctcaaggcgacattattttagcggatgaaatttcacctgacacttgccgcttctgggatgttcatacgaacgaaaaattagataaagatgtattccgcagagatttaggcggtttaacagaagcatacgaaaaaatcttacagcgaatcggaggataacccaaccatgtataaagtaaaagtatttgtcacattaagagaaagtgtattagaccctcaaggagtagccgttaaaaattcattgcaccgtatgtcttatgaagaagtagaagaagtacgcatcggtaaatttttagagctaacaatcgacagcacagattcattagatgaacgcgtaaaagaaatgtgtgaaaagcttttagttaatacagtaattgaagattaccgttacgaggttgaggaggttgtcgtacagtgaaatttgctgtaattgtttttccaggatcaaactgtgacgtcgatatgtatcatgctatcaaagatgagcttggtgaagaagtagattacgtttggcacgatacagaatcattagatcaatatgatggtatcttgcttccaggtggtttctcatatggagattaccttcgttcaggtgctatcgctcgtttctcaaatgtaatggacgctgtaaaaaaagcagcaagccaaggaaagccagtactaggtgtatgtaatggattccaaattttattagaagcaggattactgccaggtgctatgcgccgtaatgaaaacttaaaattcatctgtaaaacagtgaatttgaaagtagctaataacgaaacaatgtttacaaatgcttatggcaaagatgaagtaattgctattccagtggcacacggtgaaggcaactactattgtgatgaacacacgttacaaaaattgattgaaaacaaccagattcttttccaatacgcaggtgataatccaaacggaagtcttcaagatattgcagggattacgaaccaaacaggcaacgtattaggaatgatgcctcacccagaaagagcggtaagcgatcttttaggaagcgcggacggacttaaattatttcaatcaatcgtaaagcagtggagggaacaaaatgtcgttacttcttgaaccaaatgtagagcaaattaaagaacaaaagttatatcgagacatgggattaacagacgaagagtttgcgaatgtagagcaactgcttggtcgtactcctaattatacagaaacaggcttattctctgttatgtggtcagagcactgcagttataaaaactctaagcctgtactgaaaaaattccctatcacgggtgaaaaagtattacaaggtcctggtgaaggagctggtatcgttgatattggtgacaaccaagccgttgtatttaaaatcgaaagtcataaccatccatcagcgattgaaccttatcaaggagcagcaactggtgtaggtggtatcattcgtgacgtcttttcaatgggagcaagaccgattgcacttttaaactctttgcgttttggtgaattaacatctccaaaggttcgtcatttgtttgaggaagtagtagcgggaatcgcaggttacggtaactgtgtaggaatcccaacagtaggcggagaaattcagtttgaagcttcatatgaaggaaatccgcttgttaacgctatgtgtgtgggtttaattaatcacgaagacattcaaaaaggtcaagctaaaggcgttggcaacacggttatgtacgtaggagcaaaaacaggccgcgacggcatccacggcgcaacatttgcttctgaagaactatctgatcagtcagatgaaaaacgtcctgctgtacaagtaggagatccatttatggaaaaacttcttcttgaagcttgcttagaacttatcaagtgtgacgctttagtcggtattcaagatatgggtgctgcgggcttaacaagttcttcagcagagatggcaagtaaagcgggttctggtattgaaatgaaccttgatcttgtacctcagcgtgaaacaggtatgacaccatatgaaatgatgctttcagaatctcaagagcgcatgcttatcgttgttgaaaaaggccgtgaaaatgaaatcgtagaaatcgtagaaaaatacggattagaagctgtttcagttggtcatgtaaccgacgataagcgccttcgtttaactcataacggagaagtagtagcagatgttcctgtagatgcattagcagaagatgcaccggtataccacaagccatctcaagaaccagcatactatcgtgagttccaagagcagtcagcatatgctcctactgttgaaaatcacagtgatatgttagtaacacttttaaaacagcctactattgcaaacaaagagtgggtttacaaccaatatgactatcaagtacgtacaaacacagttgtatctcctggatctgatgcggcggttgttcgtgtacgtgatacaaataaagcattagcgatgacaacagactgtaactctcgctatttatacctagacccagaagtaggcggccgtattgcagtagcagaagctgctcgtaaccttgtatgttcaggtgcccagcctcttgcaattacagactgcttaaacttcggtaaccctgaaaaaccagaaatcttctggcaaattgaaaaagcaacagacggtatgagcgacgcttgccgtgagctatcaactccggttatcggcggtaacgtatctctttacaatgaaacaaaaggtgaagcaatttacccaactcctgttatcggaatggttggtttgatcgacgatctcaaccatattacaactcaatatgcgaagcaaaaagatgacttaatctatgtgattggtaaagctgaagcagaattcgcaggtactgagcttcaaaaagtactagaaaacggtacggtatttgggcattcacctaaattagatttagcagttgaaaaaacacgtcaagatcagcttcttcaagcaattcgtgaaggcgcagttcaatctgctcacgatattgcagaaggaggattcgcggtagccctagctgaaaaagtgatgaacggcagcggattaggtgtggacgtaacggtagacggcgaagcaacagcagagctattcagtgaaacacaatcacgttttatcgtaacggtttctccagagaataaagaaaaattcgaaatgcttgtacaagatgtaacattagtaggacgcgtaacagaagacgcaacattaactgttaaacatcaagaaaatgttcttgttcaattatcagttgaagaattaactactgcttggaaaggagcgcttccatgcttgctgaaatcaaaggcttaaacgaagaatgtggcgtattcggtgtatggggacatgaaaatgcaagccagattgcttattacggtttgcatagcttgcagcaccgcggacaagaaggcgctggtattgctgtaacagacggagaaaaagtgacagtaatgaaaggtgtcggtcttgttaacgaagtatttggccacggagagttagagcaactaaacggtaaagcagcaattggacacgttcgttatgcaacagctggaggcggagggtttgaaaatgttcaaccccttcacttccgctctcatagcggaagccttgcgttagctcataatggaaacttggttaatgcaaatgcattaaagcatcagctggaaaaccaagggagtatttttcaatcaacatcggatacagaagtacttgctcatttaattaaacgaagcggctatgaagatatgaaagataaagtaaaaaatgctttatcaatggttaaaggcgcatacgcattcgttatcttaacagaagatacgatgatggttgcacttgaccctcacggattgcgtccgttatcaattggacgattaggtgatgcttatgtagtagcttctgaaacatgtgcgtttgatattgttggagcagttcatgagcgtgatgtagagccgggtgaattactcattattaatgatgaaggtattcaatcagaacgtttcacattaaacgtaaaccgcgcaatttgcagtatggaatatatttatttctcaagaccagacagtaatattgatggaatcaatgttcactctgctcgtaaaaaccttgggaaacaacttgcagttgagtcaccgattgaagcagacgttgtaacaggcgttcccgattcaagtatttcagcagcgatcggttttgcagaacagtcaggaattccatacgaattgggtttaattaagaatcgatacgtaggccgtacgttcattcagccttcacaagaattgcgtgaacaaggtgtaaaaatgaagctgtctcctgtacgtaaaattgtagagggtaaacgtgttgtcatggtagatgactctatcgttcgcggcacaacaagccgtcgcattgttcgtatgcttcgagaagcaggagcaactgaagtacatgtacgcatcagttcaccccctatcaaaaatccatgtttttatggaattgacacgtcgtcatcctctgagctaattgctgctacgcgctctgttgaagaaattcgtgaattgattgaagctgattcacttgttttcttaagcaacgaagggttagtagatgcaatcggcagacagtatgaaggcaacggcggacagtgtatggcatgtttcactggaaagtatccaactgaaatttatccagatactgtacaccctcatgaaaaggtaacttgttagttttaacgtaaaaaaggagtgacaacatgtcatattcatataaacaagctggagttgacttagaagcaggatatgaagctgtttcacgtattaaaaagcacgtagaacgcactgctcgtgcaggtattatgggaacagtgggtggctttggcggaatgttcgatttatctacattgaatttaaaagagcctgttcttgtttctggtacagatggagtaggaacaaaattgaaacttgcttttcaaatggataagcatgacacgatcggtgtggatgcagtggccatgtgtgtaaacgacgttttagcacaaggagcagagcctctttacttcttagattatattgcttgcgggaaagcagttcctgaaaaaattgaatcgattgtaaaaggaattgcagacggctgtgaacaatccaactgtgcgttaattggcggagaaacagctgaaatgccaggtttatacgaagaagatgaatatgatcttgcagggtttacagtaggagcagtagaaaagtcagaaattattactggagatgagattaaagctggacagctgttgatcggtatttcatctagcggtatccacagcaatggctactctcttgtacgtaaaatcgttgatgatcaaggattaaatcttcaagaaacttacgctggttttaacgaaaagcttggagttgagttattaacaccaacaaaaatatacgtgaagccggtcctaaaagcattacatgcagctaagattgcaggtatggctcatattactggaggcggatttgttgaaaatatccctcgtatgcttcctgaaggtttaggtgtagaaatcgattatggttcttggccaattccatacgtgtttgatttccttgaagagcaaggcaagctagaccgtaaagaaatgttcgaagtattcaacatgggaatcggatttgttttagctgttgaacctgaagatatgaataaagtcattgaagcaattgaaaacgaaggcgaaaaagcatttgttatcggacgtgtcaaagaaggaacaggtgttgaatttgctggagggacgtttgcatgataaatattgcagtgtttgcttctggaaacggcagtaactttcaatccatctacgaagcaactcagtcaggtcgattaaaagcaaatatcgcgcttgttgtttgcaataaacccgatgcatacgtaattgaacgagcaaaagcatgtggaataccatgctttgtttgttcgcctaaaaactatgaaaataaagaagcgtatgaagcagcaattcttgcagagcttacatcagctaaagtagaatttcttgttttagcaggatatatgcgattagttggttcgacgttgcttaagccatacaaaaatcgtattgttaatattcacccgtcgcttttacctgcatttcctgggattgatgctattggtcaagcttttgatgcaggagtaaaagtgattggaattaccgtgcattttgtagatgaaggcatggatacaggaccaattattgaccagcaggctattcgcattgaaaaaggcgatacaagagaaacagttgaggcccgtattcatgaaattgaacatcaattttatcccgcggtactgaatgaattatttgaacaagccgcagttaaataaataggatggaaccttgtcaaaaaagttttaatcctttactatggtagagtagtagtgaaagaaagattttaaatgagagatcggatcaggaggagtttacaaaatgacagcaaaacgcgcgcttattagcgtatctgataaagaaggtattgtttcatttgcacaagaattaaaggacttaggagtagaaattatttcaactggcggtacgaagcgtaccctagaagaaaacggcattgacgttatcggaatctctgaagtaactggtttcccagaaattttagacggccgtttaaaaacattgcatcctaacgttcacggtgctttattagcgttacgcgataatgaagagcatcaagctcaaatgaaagagcataatatctcgccaatcgactttgtagttgtaaacttatacccatttaaaaagacaattgaaaaagaggatgtaacgcttgctgaagcgattgagaatattgacatcggtggacctacaatgcttcgttcagctgcgaaaaactatcgttctgtctcagttgtagtagatccaagcgattacgcaaccgtagtagaagagttaaaagcggatggcaatgtttcatttgaaaccaaccaacgactagcagcaaaagtattccgtcatacggcagcttatgatgcattaatcgctgaatacttaacaaacattacaggtgaaacaactcctgagaaattaacagtaacgtatgagcgtgttcaaggcttacgatacggagaaaaccctcaccaacaagcttctttctataaaaagccgttaacacaaaaaggttctattgcaacagctacgcagctgcatggaaaagagttatcatacaataatatcaacgatgcaaacgcagctcttcaaatcgtaaaagaattcaaagagccggctatcgtagcgatcaaacatatgaatccttgcggtgtaggtgtgggtgaaacaattgctcaagcttatcaaaaagcatacgaagcggatcctacatctatctttggcggcatcgtagcagctaaccgtcctatcgaccgtgaaacggctattcagttaaaagaaatcttcttagaaatcatcattgctcctgcgttcgatcaagaagcattagatgtattaacagctaagaaaaaccttcgtttactaacgatagagcttgatgaaaaagcagaaaaagaagctttcttaacatctgtaaaaggcggcgtgcttgttcaggatgaagatgtgttcggatttgatgatgcaacgattactgttccaacgaaacgtgagccaacagaaaaagagtgggcagatttaaaattagcatggaaagttgttaagaatgttaagtctaatgctattgtacttgcgaaagatgacatgacaattggcgtcggagctggtcaaatgaatcgcgtaggcgctgcaaaaattgcgattgaacaagctggtgaaaaagcacaaggttcagctttaggttcagatgcgttcttcccaatgggcgatacagtagaagcagcagctaaagcaggaatcacagctattattcagccgggcggatcaattcgtgatgaagagtcaattgcaaaagcagatgaatacggcattgcaatggtatttacaggcgtaagacattttaaacattaatgaggtgaagaacgtgaatgttttagttattggaaaaggcggaagagagcatacaattgcatggaaagcttcaaaaagtccacttgttaacgaagtgtttgtagcaccaggaaatccgggcatgagagatgtggcaacgattgtaccaatcgatgaaagcagccaagaagagcttgtgcagtttgcaaaagaaaacaagattggattaacaattgttggaccagaaaatccgctaattgaaggcattgttgatcggtttgaacaagaaggtcttccagtctttggaccgcgtaaacaagcagcgatgattgaaggaagcaaaagctttgcaaaagagctcatgaaaaagtatgatattccaaccgcagcgtatgaaacatttacgtcttacgaggaagcaaaagcatatgtggaaaagcaaggcgctccaattgttattaaagcagacggcttagcagctggtaaaggtgtaactgttgctttaacagtagaagaagccgtagatacattacgtgattttctagttgaccaaaagtttaaagaagcaagtgcaaaagtagttgtagaagaatttttggatggtgaagaattttcattaatggcatttgtacgcggtacaaatgtatatccaatggtaattgcacaagatcataagcgtgcttttgacggcgatcaaggtccgaacacaggaggcatgggagcttactctcctgttccgcaaatcagtgatgcagaagtacaagaggctgtagaaaacatcttacttccaatggctaaaggattagctgaagaaggctgtgagtatacaggaattctatatgctggtctgattcaaacacaaaaaggaccaaaagtgattgaatttaatgcgcgttttggagatcctgaaacacaggttgtactgccgcgtatgaaaagcgatttagtcgatgtgcttcttcgcattttgaaagaagaaaaagtagaaattgaatgggatgacgaagcggctatcggaatcgtattagcagcagcaggctacccagaagattatcaaaaaggtgcgccaattaacgggttggatgcgattagtgaagacgcgcttgttttccacgctggtacagctttagaaaacgacacatacgtttcaaacgggggccgcgttctattagtaggtgccaaaggagcaacccttcaagaagcgcagcaagaagtatacaaacaaatggctcatattgatgtagaaaaaggctttttctatcgcaaagacatcggccatcgtgcattaacaaaagcagctttaaaataaaaaaggagagctccggctctcctttttaccttatgaaggattatacgtttcttcgtttccgtttggatggtgttcatgttcatcatgtttttgacatgaatcatatgcgtacgtaaggggacaaaaacgcgtgatgccttctgcaacttttaaagcgcccattaaccctaagaagatgtatgaatctttgtacggtctgcgagataaacgagatgttgtccaagaaagaagggtaaaacccagcgtaagtcgaattaatgcgttaacaatgccgatatttggtttcatgttttatcacctttattcataaaattaataacagtttctgaatgcgtttacatcacggatgtgttacgataaaaatacatagtaaattagggggaatttagcatgccggaacaaagataccgctggaaaagcaaacatattagacagcagctcttagtattaaacggtcaaaaagcaccaactattgtcttaaaagatgcaacatatttgaacgctcgaatgaagcagtggaaaaaagcacatatttgggtctaccaagatcgtattgtatacgtcggctcagagatgcctaagcacacggacgcttctacagagattatagactgcagtgagaaatatgtggttcctgggtatattgagccccatgttcacccgtttcagttatataatccccagactttttcccaatatgcagccaagcacggaacaacgactttgtttaatgataatttaattctcgctttacagctcgaacaaaaaacggcgttttcattgattgaagaaatgaaaacgttaccacaatcgctgtattggtggtgcagatttgattcgcagacggaaattgatgaagaggctgacatcttctcacatacaaacattacttcttggctacaaaatgaagctgtcttacaaggaggcgaactgacaagttggccgaagcttttagacggagatgatttaatgcttcactgggttcaagagacaaaacggatgagaaagcacattgaaggacatttcccaggggcgtcagcatttaccttggcaaaaatgaaattgctcggagcagacagcgaccatgagtctatgactggggaagatgttgttgctcggttaacacaaggctatgacgttgctttgcgccactcttcaattcggccggatttgccaaaattgctgcaggagttaaaagagctgcaggtagattattttgaccatattacgatgaatacagacggttctccgccttctttttaccaaaatggcgtgtcagatatgttaattacattagctatttcagaaggggttcccgtgttagatgcttataatatggtgtctgtaaatattgctcgctattataacatggaacatttgcacgggcatgtagcaacaggctgtgtggctaatattaatattttagaagatcctatgcggcctactccggtctctgtgctagcaaaaggaaagtggatgaaaaaagaaggcaaagaacaagcattagcctcagtagaatttccttgggaaaagtttggtttttcaccgttaaagttggactttgatttaacgatggacgattttcaattttcaatgccagtaggcgtaaaaatgaaaaatgctgttattatggagccgtattcaattcacttgaatgtgagcggagatgtattggcctctgatcatgatgaaagttttttagtgctggtggaccgagaaggcaagtggcggatcaatacgctgttaaaaggatttgcgacaaatgtatcgggactggcgagttcattttcaaatacaggtgattttattttaattggaaaatcgaaaaaagatatgatgtgtgcattcaaacgtatgaaagaaattggaggcggtattgtcattacagaagatgagaaagtagtatacgaactggttcttccgttaaaaggagtcatgtcaaacctgccgatggaggagttaagtaaacgagaggtagaactcaagaaagtgctgggtgggcgaggatacaagcacgatgatcctgtctattcactgctgttcttttcgtctacacatttgccctatattcgtatcacgccagtaggaatttatgatgttatgaataaaaaagtactttttccgtctataatgcgttaaaatataaaagtatcaaaggaatttgaaatttgtatgaaattggctgtcttcatacagaatgaatgtatgtgcaaataaatatagaaactgtattttatagatagaaacaaccagtaaagaaagccaatgataaaggagttcgatacgatgcaaatcaacaaactacgaggaaaagaattagatcagctatttcaagcgattttatcattagaaaaccttgaagaatgctatcaattttttgatgacctatgtacagttaatgaaattcaatcattagcacagcgcttagaagtagcaagaatgctgcgagaaggcaacacgtaccataaaattgagacggaaactggagcaagcacagcaactatttcccgtgttaaacgctgcttgaattatggaagcgatgcgtatcaaatggtgttagaacgccttcaagaagattcgaatcaaaagtaaagcgtatggctgaagcagccatacgcttattttttaattaaaattgagttgcttcttcaatgatatttttaaggtcgctaattgctacacgtttttgttccattgtgtcgcggttacggattgttacttgattgtcttctaatgaatcgaaatcgaatgtaatacagaacggcgtaccgatttcatcatggcgacggtaacgtttaccgattgaaccagcatcatcatagtcaatcataaagtattttgctaaatcttcaaagacagcgcgagcttcgttagaaagctttttagaaagtggcaatacagcagctttaaatggtgctaaagcagggtgaagctgcataactgtacgagaagagccatcttctaacgtttcttcttcatatgcatcaatcatataagctaatgttacacggtcagcgcctaaagaaggctcgatgcagtaaggtacatagcgttcgtttgtttcttgatcaacatattggaagtcttctccagagtgttccatatgctgctttaagtcatagtctgtacgagaagctacgccccatagttctccccagccgaatgggaacttgtattcaaagtctgttgttgcattactgtagtgagaaagttcatcatcatcatggtcgcgaagacgaacattttcttctttcataccaagagaaagaagccatttattacatgtttctttccagtagttaaaccactctaattcagtgcctggtttacagaagaattcaagttccatttgttcaaattcacgcgtacggaatgtgaagttaccaggtgtaatttcgttacggaagcttttacccacttggccgataccgaacggaagctttttacgcattgagcgctgaacgtttttaaagtttacgaaaataccttgagctgtttcaggacgaaggtaaatttcatttgttgatgtttcagttacaccttggtgcgttttgaacattaagttaaattgacgaatttcagtgaagttagctgaaccacactcaggacatgtaatttcatgttctttaattaagtcagccattgcatcaaatgaaaggccgtctacgatcatttcaatgcctttttcttgaagtttttcttcaattagtttatcggcacgatgacgggctttacaatccttacagtcgatcattgggtcattaaagtttcctaagtgaccagaagcttcccatgtttttggattcattaaaatcgcagcgtctaaaccaacgttgtatggagattcttgaataaattttttccaccatgcttttttaatattgttttttaattctacgccaagcgggccgtaatcccatgtatttgcaagaccgccgtaaatttcagatccttgaaatacaaagccgcggtgtttagcgtgagatacgatttgatccattgtttttgacattctaattcctcctgtaaatggtagtgattcaagcgaaacaaaaagagcgggtacaaaaaaactctcgtccctgggcatatcaacaatatgcccagggacgagagtttttcccgcggttccaccctggttgatacaaaatgtatccaccttcgtctgtatatactccagattgccttttccttaaaccattctctaggctctcaccgtccctagttcgctttgtgaagaggatttaagtactattgatccttcagcgtatttcatatgaattttagtagctatatattagcatatcctatgcagagaaacaataaccttgtgcaaaatgggcttttttttgtgatgttttcttccgggatttgaggataaaaccatatcttttcaccatattttttgaaaacaaaaaacgtgatgaaaagttcggttttcctttcatttcaccctcttagttttgttataatgaacaaatggacgagcgcgaacttttaagtgtaaagaaatggaggaacatatatgtatgatattaaagagtggagacatgtctttaaattagatcctaataaagagatttcagatgcagatttagagaaaatttgcgaatccggcacggatgcggttcttgtcggaggatctgatggagtgactctagacaatgtactgcagctgttaatgcgtattcgccgctacacggtgccgtgtgcgcttgaagtatcaacaattgactctgtaacacctgggtttgattcttattttattccgaccgttttaaacagcaaggatccaaagtggattgttgatttacatcacgcggctatgaaggaatacggagagatcatggactgggatgaaatttttgtagaaggatactgcgtacttaaccccgaagcaaaagtagctgcgctaacagaagcgaaaacagatttggatgcagaagatgttgtagcgtatgctcgtatggctgaacgcatgtttcatttgcctgttttctatctagaatacagcggaacgtatggagatcctgaattagtggcagaagtgaaaaattcactaaatgagacgaagttattttacggcgggggtattgagacaaaagagcaagcgagtgagatgggagagctagccgatacggttattgtaggaaatgttatttacacaaatttatcggaagcgttaaaaactgtaaaagcagtaaaaaagaatattgcacagtgaaaaataaataaagtagaatagagaatatatgttcgatataggcggtgaaaacgtgaattttttaagtgaaaaattattaacaggattaaaccctcagcaacaagaggcagttaaaacgacagacggaccactattacttatggccggtgcaggaagtggaaaaacacgtgtattaacgcatcgaattgcgtttttaatggcagaaaaagaagttgcaccttggaatattttagccattacttttacaaacaaagcagctcgtgaaatgagagagcgtgtttcaaatatcgttggcggagtggcagaagatatctggatttcaacgttccactcgatgtgcgtgcgtattttacgaagagatattgatcgtattggctttaatcgtaactttacgattttagattcaacggatcagctttccgttattaaaaatattttaaaagaccaaaacatcgatccaaaaaaattcgatccgcgctcgttattaggaagcattagttcagctaaaaatgaactgaaagtagcggaagaatttgataaaacagcaacgggaccttatgaagaagttgtaagcaaagtctacaaagagtatgaaaagcgtttaaagaaaaaccaagcgctcgattttgatgatttgattatgacaacgattcagctatttaaacgagttcctgaagtgttaacttactatcagcgcaagtttcaatatattcatgtggacgagtatcaagatacaaatcatgcacagtatatgctggttcgcttgctagctgcaagatttgaaaatgtatgcgtagtaggggattcagatcagtctatttaccgctggcgcggggctgatattacaaatatcttgtcatttgaaaaagattacccaaaagccaaaactattttgcttgaacaaaattatcgttcaactaaaacgattttggctgcggcaaacggcgtcattgcaaacaatatgaatcgtaaagtgaaaaacttatggacggaaaacgatgaaggccagaagatttatcattaccaagcaatgagtgagcatgatgaggcacagtttgtagcacgtaaaattaaagaagcagtagacagcggaaagcgtaaatacagtgattttgccattttgtatcgtacaaatgcacagtctcgtgtgatggaggaagtgctgttaaaatccaatattaattatacaattgtcggcggcattaagttctacgaccgcaaagagattaaagatttgcttgcatacttgcgcttaattgccaaccaagatgatgacattagcttagctcgtattgtgaacgttccaaagcgcggagttggagctacttcagtcgataaagtggccaattacggaaacgttcatgacatttctattttcaaagcgctggatgaagtagaattaatggggttaacaggcaaagcaacaaaagcccttcgtgatttccaatcgatgatttcgaacttagctcaaatgcaagactatatgtctgttacagagcttgtggaacaagtattagaaagaacaggataccgtgaagcgcttaaagtggaaaaaacaattgaagcacaaagccgcttagagaatattgatgagtttttatctgtcacaaaaacgtttgaagaagcaagtgaagataaaagcttagtagcatttttaaccgatttagcacttgttgctgatatcgataagcttgaagacgaggaagaagaagagaacgaacaagtgattctgatgacgcttcactcggcaaaaggtctagagttcccggttgtttttctaatgggtatggaagaaggcgtattccctcatagccgatcattattcgaagataatgaaatggaagaggaacgacgcttagcctacgtagggattacgcgtgctgaacaagaattgtatttattaaatgctcaaatgcgcacactatttggtaaaacaaacgttaatccaaaatcccgcttcattggagaaatcccaagcgagcttgtggaatctttaaatgaagcaatgcgcaaacctgctgctggtcgttcaggggcttcagcttcgccgtttgcagcgcgccgacaagcggccgtggcaaaaacgaagcttgtgtcaacaggcagtgaatcaattggatggagcgttggagataaggccgagcataaaaaatggggaattggtacagttgtaagtgtaaaaggagaaggagattcaaaagaattagacattgcttttcctagtcctacaggtgtaaaaagactgcttgctaaatttgccccggttacgaaagtgtaatcgtgaaaaggagctagaatatggagtttgagacagcaaaatcccgcgttcaagaattacgtgacttattaaatcaatatggctatgaatattatgtgttagatcagccatctgttccagatgcagaatacgataaattaatgaatgagttaattgagatagaagaatcatttccagaattaaaaacagctgactcacctactcagcgcatcggcggccaagtgctcgatgcgtttgagaaggttcagcatcaaacgtctatgctaagtttaggaaatgcatttaatgaagaagaccttcgggattttgatcgccgagtgcgccaagccgttggagatgagttttcttatgtatgcgaacttaagattgacggtcttgctgtatctcttcgctatgaagatggatacttagtgctgggggctacgcgcggagacggtacgactggtgaaaatattactgaaaacttaaaaacaattcgctctattccactgcgaattaaagaaccgttatcaatggaagttcgcggagaagcatttatgccgagaaaatcattcaaagcacttaatgaagcaaaaatggaaagggatgaggttccgtttgctaacccgcgtaacgcagctgcaggctcactgcgtcagctagatcctaaaattgcggcaaaacgtaatttagatatctttgtatatgccatgactgatacaggagaattagaaatcgactctcacagcgaaagtttgaatttactcgatgagcttggttttaaaacaaataaggaaagacagacatgtgaaaccattgatgatgtgattgcttacatcgaaagctggcaaacgcaacgtccagaactatcttatgatattgatggcattgttgtaaaagtagattcatttgatcagcaggctgagcttggaacaacggccaaaagtccacgttgggctattgcttataagtttcctgctgaagaagttgtaaccaagcttgtaaatattgagctgacggtaggccgtacaggtgtcattacgccaacagctattttggagcctgttcaagtagcaggtacgacggtacagcgtgcgtctcttcacaatgaagatttgattcgtgaaaaagacattcgcatcggagattatgtcgtagtgaaaaaagcaggagatattattcctgaggtagtgaatgtgattgaggagaagcgaacgggagaagagcaagagtttacgatgcctactcactgtccggaatgtgaaagtgaactggtgcgtttagaagaagaagttgcgcttcgctgcattaatccaagctgtcctgctcaaattcgtgaaggacttattcatttcgtgtcccgcaatgcgatgaacattgatggacttggtgaaaaagttatatcgcaattatttcgcgaacagttaattaaagacgtagcggatatttatacgctgacaaaacatcagttaatcgagcttgagcgcatgggtgagaaatctgctgataatttgattgcagccatcgaagcatcgaaagaaaattcgcttgagcgtttgctttttggtttgggcattcgccatgtcggagcaaaagctgcaaagacgttagctcagcactttgaaaccatagacaagttaacaaaagcaacgtatgatgaattagtggcaattaatgaaattggtgccaaaatggctgatgctattgttgcttactttacacaagaagaggttcaagaacttatacatgaattaaaagagtatggagtaaaccttacatacaaaggacccaagcttgtaagtgtagaaaatgtagattctgtttttgctggtaaaaccgttgtattaacaggtaagcttgaacagctatctcgcaatgaggcaaaagcacgaattgaagcacttggcggtaaagtcacaggaagcgtaagtaaaaagacagaccttgttgtggcaggggaagaggctggttccaaactgacaaaagctaacgagcttgaaattgaagtatgggatgaggcaaggctacttacggaattaaataaataagaggtgtgtgtagttgaaaaagatattgttactttctcttgcggtcatgcttgtaacttcagcgtgtgcaccgaatctttcggacgataaagagactgttcaacaaaccaacaacaagaaagaaaaagcagttattccgaagtatagtatttcagatgattattaccgaacaattcttccatttaaagcgggagtggcaagaggcttagtcgcagcaaacttaaacaaccgcttggatgcgcaagaatttgaaacaggcttaatgcgcttatcgacagatagctattctccgaaaaaatatgtgtatcaagaaggccagtaccttgataaagatactattcgctcatggttaagccgtaagctgagcgataaacagtttaaagatcttcaaagtaaaacaaaagataagacggcgaaaaagaagcttaaaaacaatgggttaaatccaatcgatacggaaaaaggcgatttgaaaactcgtaacgaaacaagcccaatgtacttagcgaacattactgagcaagattaccttatccaagacggagacgacaaggtaaaacttggaggcgtcacaattggcctggcgatgaattccgttcattattatacagaagaaaatggctatgctcgtgaagtgaagcttacaaataaagagattgaagcccaaggaaagcaaatggcagatgagattgttaagcgtatgcgcgacatcaaaggcctagaaaatgtgccagttcgagtagcgctattcaaacaaagtgctaagtcttctttaacaccgggtaactttatagctgtcggaaatgcaggttcaaatgatacggccgttggcagctgggataatttagacgagcaatattatttattcccatcatcagatgcaacaaaagatcatcgagacgatgcgatgaaatttgatgagtttaaagcgcaaatcgaagactacttcccgaactttacaagcgtagtagggaaagggtattacaaagatggacagcttcaaaagatgacgattgatattcccgtacaattttacggaaaaggtgaaattgtaggatttactcagtacgttgctggtttaatgcttgatcatttcccttcatatatggaaacgagtatctctattaactcagtaagcggaccggaagctctcattgttagaaaagcagatgaagacaagccgttcgttcatatttacgaagagtaagcaaaaaagacactgctcaagcagtgtctttttctaattctatgagattgcctcctatgaaggaatggcgtgagaattttgtcttgtaaacttagcaagataataagcagcaaatgcaaacgcatcttgttcggttgtccgctcttcatacgggcgctttttatcaagctcaaattctttctgataataagggatgtgatcttgaatatagtggcgcagctcgtgaaagatcgtttcaacaagcggaagatagtcctcaaatttaaaaataaatataatgccgacttctcgccagtaaacgcctgatgcaaactgcaggtattctgcttcttcttctccaagagcagagacaattttattggcttcgcatgaatcacaaaaaatgataggaatatgaaaggctttatttaaacaagcaaaaacatctttttgcaaggtgggcaaatcccacttgaattcttcatctaatacaaaccatcttccgctttgctgatacacagggcgctggtggatgactgactgtataagtattttattcaatttttatagcacctcttttacggtaaagtagttattcgttttctttactttcccaaagactagtgaaattaaaacatggtggtgtgttcatctgaagcatgtttctctttctatctatcttttctaaaaagaaggttattttatacctatgccagagagaaatattttatgataaaggaaaagtatggaatgttgtttgaatgaaatagatttggtataaaatagaagtgataaatgtaagccctgtcttgcctggcggggtttttaatattttaggaactagtctcagaaatgttgcctgttgctagtgaagtttggtattatcagtatattgtagtgggacgaatattcggaggtgaaggaacatgtcaagaatttctgttgatcaagtaaaacacgttgcaaacttagcgagacttgcggtgacggatgacgaagctgaactatttacaaaacaattagatgctattattacatatgcagaacaattagatgagttagatactacaaatgtaaaaccaacttctcacgtattgaatatgaaaaacgtaatgcgtgaagataagccagctaaaggtttaccaattgaagacgtagtgaaaaatgcaccagaccacaaggatggctacattcgagtaccaactattttagaataaggaaggaggctttacgatgtctttattcgatcgtaaactttcagaactacatagccttttacacaagaaagaagtacgtgtacaagatttagtagacgaatcatataaacgtattaatgaagtagatgataaagtaggtgcgttcttagcgcttaatgaagacaatgctcgtgcttatgcaaaagagctagatgaagcactacaaacaaaagatgaatttggcctattatttggtatgccaatcggtgtaaaagataatattgtcacaaaagatttacgtacaacttgttctagtaaaattctagcaaactttgatccgatttatgatgcaacagttgttcaaaaattgcaggcagctgaagcggtaacaatcggtaaattaaatatggatgaattcgcaatgggttcgtcaactgaaaactcaggtcttcagttaacgcgcaacccatggaatttagattacgtaccaggtggatctagcggtggttcagctgcagctgtagcagcaggtgaagttccgttttctttaggttctgatacaggtggttcaattcgtcagccagctgcttattgcggtgttgtcggattaaaaccaacgtatggtcgcgtatctcgttacggattggtggcatttgcatcttctttagatcaaatcggaccaatcacaaattctgttgaagataatgcatacttacttcaagcaatttcaggcgtagacccaatggactctacttctgctaatgttgatgtaccggattatgtatctgctttaacaggtgacgtaaaaggtcttaaaattgctgttccaaaagaatacttaggcgaaggtgtgggcgaggaagctcgccagtctgttttagatgcactaaaagtgttagaaggactaggcgcaacttgggaagaagtatcgcttccacactctaaatacgcattagctacgtattatctattatcttcttctgaagcgtctgctaacttatctcgttttgacggcgttcgctacggatatcgtacagataatgctgagaacttaatcgaaatgtacaagcagtctcgaagcgaaggctttggaaacgaagtaaaacgccgtatcatgcttggaacgtttgcgttaagctctggttattatgatgcttactacaaaaaagcacagcaagtacgtacgttaattaagcaagactttgagtctgtatttgaaaactatgacgttatcatcggaccaactacaccaactccatcattcaaaattggtgagaaaacagacgatccattaacaatgtatgcaaacgatattttaacaatcccagtaaaccttgctggagtacctggtatttctgtgccttgcggcttatcaaatggattgccattagggttacaaattatcggtaagcatttcgacgaaagcacaatctatcgtgttgctcatgcattcgaacaagcaactgagcatcataaagcgaaaccagcactgtaaggggtgagataaagatgaactttgaaacgattattggtcttgaagtacacgttgagcttaagacaaaatctaaaattttctcagcaagtccaaacgcatttggtgcggctccaaatgctaacacaagtgtaattgacttaggttatcctggcgtattacctgtgttaaacaaagaagcagttgattttgcgatgaaagcagcgcttgcgctaaactgtgaaatcgcaacagatacaaagtttgaccgtaaaaactatttctatccggataacccaaaagcttatcaaatctctcaatttgataaaccaattggcgagaacggttggattgaagtagaagttaaaggtgaaacgaagcgtattcgtatcaaccgacttcatttagaagaagatgctggtaagctaacgcatacgggcgatggctattcactagtagacttcaaccgtcaaggtacacctctaattgagattgtatcagaagcagatatgcgttctcctgaagaagcatatgcttatttagaaaaattaaaatcaattattcaatatacaggcgtatctgattgtaaaatggaagaaggttcacttcgctgtgatgccaatatctctttacgtccagttggacaagaagagttcggtacaaaagctgagttaaagaacttaaactcatttaactatgtgcgccgcggtcttgaacacgaagaaattcgtcaagaaaaagtgttattgtctggtggcttaatcgagcaagaaacacgccgttttgacgagtctacgggcgaaacaattctaatgcgtgtaaaagaaggatctgacgactaccgctacttcccagagcctgacttattagaattacacatcgacgaagagtggaaagaacgcgttcgtgcttcgattcctgaacttccagatgctcgtaaaaagcgctatgtagaagagcttggcttacctgcttatgatgcaatggtattaacgctaacaaaagaaatgtctgatttctttgaagcaacgcttgctgcgggcggagacgcgaagctatcttctaactggttaatgggtgaagtttctgcttacttaaactcaaaccaaaaagaactttcagatgtagccttaacacctgaaggtctagctggtatgattcaattaattcaagaaggtacaatttcgtctaaaattgcgaaaaaagtattcaaagaattaattgaaaatggtggagatgcaaagaaaattgtaaaagaaaaaggtcttgtacaaatttctgatgatgcaactttacgtaaattcgtaacagatgcattagatgcaaaccctcaatctattgaagatttcaaaaacggtaaggatcgtgcaattggcttcttagttggtcaaattatgaaagcttcaaaaggccaagcgaacccaccgatggttaataaaattcttttagaagaaattaataaacgctaaatttgataaataaatgtgaggtggatatccatctcacatttattatgagtaagggcgatcgcgctgaaggtatgaataaaaaccgaaacgtgaatattgtatatcaaggttaatttctttataatatgtttgttcatgccccctcttgttgatgatgtaatgtgagggggcattctttcactgataaaagtaggcaaagatttgtgacaaattatcattattaggatgatgaatatgaaaagagcgagaattatttataacccgacatcgggccgtgaaatttttaagaaaaacttaccggaagtcttgcaaaagctagagcaagcaggctacgaaacatcttgtcatgctacaacttgcgctggtgatgcaacagaagctgctaaagtagcagtagagcgtcgttttgacgttgtaattgcagccggtggagacggtaccatcaatgaagtcgtaaacggtatcgctggacaagactatcgtccgcagctaggtattattcctgttggaacaaccaacgactttgctcgtgccattaatgtgccccgtacgattgaaggcgctattgatgttattgtagaaggcgtaacaaagccaattgacttgggctgtgtaacaaacgacggagaaacgcattactttgtaaatatcgccggaggcggccgtttaactgaattgacatatgaagtgccaagcaagttaaaaacaatgcttggacagctagcttactatttaaaaggcatggaaatgcttccttctattaaaccaacatctgttgaaattgagtatgacggaaaattctttggcggagagattatgttcttcctcgtttccttaacgaactcagtcggcggttttgaaaagctggcaccagattcttctttagatgacggcatgtttgatttaattattttaaagaaagcaaatttagctgaatttattcgaattgcgacacttgcgctgcgaggagaacacatcaatgatcctcatattatctacacaaaagcgaaccgtgttaaaattcatacaaatgataaaatgcagttaaatctagatggcgagtacggcggattattgcctggggaatttgtaaacttatatcgccatgtagaaatctttgttccaaaagcaacagctgaattgatggaaaaaaatgagatcgcctaaatgcgatcttttttcatgcttttctttgtttggctttcgctcttatggtacaatcagttcagcattttcaaatgactaaaaggatgtaacgataaatggaaaaattaaaaccacctgtagaaaaaaatgaatatatagatgttgcgtttgaagatttaacgcatgacggagcgggtgtagcgaaagtgaacggatttcctattttcgttcaaaatgcgctgcccggtgaaagcggccaagtaaaagttattaaagtaaaaaaaggctatgcgtttggcaagcttatcaagcaccatacaattagtgaacagcgtgttgaagcaccctgtccggtctacaagcagtgcggaggctgtcagctgcagcatgtaagctatgaaggacagttgcaatttaaacaaaagcaagtaaaagacgtcatggcgcgaattggtcatttacctgacgttccggtacattcgacgctaggaatgaacgatccttggcgctatcgaaacaaagctcaagttcccgtggcagaacgagaaggcggtttggtcgctgggttttaccagcagcgaagccacgacatcattaacatggatgcctgtttgattcagcagcaagcaaatgatgatgttgttcaagctgttaaatcaatctgtgaaaaacatggcatttctgcttatcaagaacaaaaacataaaggctcacttcgtcatatcatggcgcgctacggacttgtaacgggtgaaatcatggttgtcattgtgactcgtacagctgagctgccaaacaaaaagcgtattatagaagacattatcgaagccgtgccgaacgtgaaatcaattgttcaaaacgtaaacagcaagcgcacaaacgtcattttagggaaccaaacgaacgtactttggggagaagaatatatttacgattatatcggcgacgttaaatttgccatttcagcaaaatcattctaccaagtaaaccctgagcaaacgaaagtgctttatgacaaagcgcttgagtatgcagatttaacaggagaagaaacggttattgacgcttactgtggaatcggaacaatctcattatttctcgctcaaaaagcgaaaaaagtatatggcgttgaaatcgtgcctgaagcgattgaagatgcaaagcgcaacgctgagctaaacggtattcacaacgctgaatttgaagtaggcgaagcagaagtcgtcattccaaactggtacaaacaaggtatcaaagcggacgtcatcgtcgtagatccgccgcgaaaaggatgcgacgaagctcttttgaataccatcattgacatgaagccgaaaaaagttgtctatgtttcatgcggaccagcaactctcgcacgtgacctagctattttagaaaaaggcggatatgagacggttgaagttcagcctgttgatatgtttccgcatacgacgcacgtggagaatgtggcggtgcttacattaaaataagaggataaatacgtagatcgctatcaatgaaatgatagcgatcttttattttccttataaataaaaagtataagtaaataattttatagttcttttgtcgcaaaatgtctaaaattaaatagttatattttcttaaaattctgatattataggtctgtagtattatttttacaatattgataagggggacctatatgaaaaagtctttaagtgctttattgggagtaagtttattagtatctggattaacgctaggcgcggagtcaagttatgcagagtcaagtactaattctaatgtaaaaaaggctacgcaacagttgaatcctactatccaaattcctgctagtaaagtgaagaaaaaagaaaagaatttatttagcggtagctctaaaaaagaaactagaagaggaaagataactgaagcggatgcaaaaagaggatacataaaagacgaaattattgttaagtttaaaacgaataagtctcttagtagtttaggagataaaataaaggtaaaagggttaaagttaaataaaacgttagataaaaaactgggaattcaaacgttaaagtttgatacgaatgtatcaactatgaaagaaatcttaaaagccttaaatgcttccagcgctgtggaatatgctgaacctaactatatttataaaccagccgctgtttcagagccatattatcaatatatgtggggattaaaaaatacaggtcagtatatagatggagtggcagggaaaaaaggtattgatataaacgctgaaagcgcttgggtgaaaacaaaaggaagcgctagcactacggtagctgtaattgataccggtgtagatatttatcacccggatttgaaggataatatttggaaaaatcctggagagatagcaggtgacgggatagataatgatcgtaacggctatatagatgatgtaaatggctgggacttttattatgatgatgatgaagtttattatgatgaagaatatgatgctcacggtactcacgtagcaggaacgattggggctaaagaaaattctacaggagtaattggtgtagcaccaaatgtcaaaattatgtcattaaaatttattggccctgatggaggtagtacagatggtgctattgccgcaatcaactatgcaaaatccaaaggtgttaaagtgtctaacaattcttggggtggcggagaatactcacaggctttatatgatgtgattaaaagttccaattctacttttatagctgcggctggaaatgatggtgacaatattgacccttatcctgcttatccagctgcttatgatttacctaatattgtttctgtagcagcaattgataatcaaggtaacctgggcgatttttctaattacggtagtaaaaatgtagatgtagctgcaccaggtgtctctgttttgagcaccattcctgaaaatagttacgcttatggagacggcacatcgatggcagctccacatgtaacgggtgtagcatcattggttttagcagcaaatccatctttcagttctgcacaactaaaagatacattgatgaaaagtactacaaaactgtcatctttgacaggaaaagttgcaagcggcggtctagttaacgctggattagcggtatcagctgatatagatggagaaatacctggagtgtctttaaatggaaatagcataagctctacgttgaacgcctccacagataaagatgatgtatattcagtaaagttaacaaaaggcgaaaagtttacagtgtcgttatcaggagctgcagggacagattttgatttgtatttgtataatcaaaatgcaaaaactgtaaactctagcgatggtatcgtagcttattcagaaaagttgaatacttcaagtgaaactttaacgtttgtagcgtcagctgatggtacttattatttagatgtatacgcttataaaggaagcggaagctataaagtagatgtgaagtacggagcaactgctggggtatacgaagatactagtacaaatttggcttatacaggaaactggagtaaagtgtcaaacagcagttcatcaggaggatcatacaaagctgtaaatgaagcaaatgctagcatgcagtttgtatttaatggaactgaagtatctttaaatacgcttaaggataatacccaaggacaagcaaaagtaacgctagacggcaccgcttattgggttgatttgtacgctgataagccacagtataaagctacagtgtttaacaaaaaaggattaaaagcaggaaaacatactctcaaagttgaatggtctggaaaagttcatcctggagctaaaaagaccgtaacaaaagtaacgctagattccattacagttaaataatctgaatatgtgtgttgattaggggcagctttcactttaggatgctgtctcttcttaagtaaaaaagaggagaaaccatcatggaaaagcaatactttaatttaatttcattctttaacggttatgtacggagctatcgaagaatgaacttgtcaagtttacataatcgatccatgttcacaaaacgagaaattgactattttgctcatttaggggagttgttaggctttgacgcctttattgaagactctaagttcgattgcttgaaaggtcgttctagaccaatggatttatcttggtggaaatgggatgctcgatttgatgacgaatactttttatatttggccttacatttagaacgagaaaatgtttgggaaaaagatgtcgataccattcaaaagttattttcacaaacgaaagaagaatatattcctcataatgtaataggaattcagttcgtagagtcttttgaaaggataaaatatttaaatgaattgattcttcaaaaaaattccattcaaaagtctaatgctttaatgatttatcgatattatgatgctgagattaattcagaaagaatttatgcgtgcagctttactccagaaggtatgagtgaagtaagaaaagctatatgtgctcaggatcaaacggggtattggtttatggtatttgaagaagaatatcaacaagctgattttgataacgagaaaattagtatagaaagataaatgggaaatttgctacataaaaaatcaacctatttgaatttaaagcgaaagaggacaccgctaaggttttttctttcgcttttttacatttgtccaccccaccaacacagcaaatttctgaatatactttttttaaggttttcaatattttaggaattataataaagaagcaataaatgaaaacattatatttgtggtaagaggtgaagggacatcatgtatagagcaattgctattatagcaggttctgtgttaattggatttgcatacaattggtttttaatcccccataaagtgctaagcagcggtattagcggtattgctatgattataggaattttaacgcctgcaagcacgggaacaatgaattttttgttgaatttaccccttttaattattggttttatgaagttaggaaagcggtttgtcttacatacgctgctgtccgttgtggctttatcaattgctttatacgtgattcccttgagagctgttagtacagatcctattctgtcagctgtttttggaggagttttaactggaattggcgtagggtttgtttttcgtcagtcagcttcgacaggtggatttgatattattgcgatgcttcttacgcataaaaaagaatttcctcttggcgctatattatcagcgatgaatgccgtggttgtatttgtttcaggtttctttgtgaattgggacgcggctttatatacgatgctttcgattttcgtcacaggaaaagtagtggatgcgattcatactcgccatattaagcttaccttaaccattattacgagaaaaggcgaagaaatgaagcagcagcttcttaccaatttagtgcgcggcgtgacgttaatgaacggtgaaggagcttattcaagagaagaccgtaaaatattaatgacggtgatttcgcgctatgagcttgcaaacctcaagcagttaattcaatcggtggatcccgaagctttcgtaaatattacggaaacggtagaagtaatggggctgtttcgacgggatgcttattaatatatttgttatttcagcacggatttatgataaatagccatttttatagtataaaagttataaaaaaagccttaagagtagttcttgaggctttttttgcgtaaaatatgagtaagaaaatatcgtgtatgaaaagtataaaaaagggaatttgatagagtacataaaatattgacatcaaaaaggagagactatatgacggtagaatatcagttaacgaaaaagaaatattacgaaacgtttatgcaagaaaatgaaaatcagccgcctgtaaaagtccttggacaagcttattacgaagagcagcaaaaagagtggtacgacttatcgctcattcgcttagcgcagggagaagtgtacttccataaccaagattttgaatccgcgatttttaagtgggagaatgtaaatggcgagtttaagctgtgggcgaagaaaaatacagccgacgcacattatgaattggggttgtctacgctcgctgaagagctttacctatccatcgaaacggattcaaaagtattaaaagctgaaatagcgctaaagctgttttcactttatacggatcataacaatattgaacgagcttatgaagtcattaacgagctggttgcttctcagccagattatccaaacgtcacggcgattgcacgcagattttatgaagagcaagaagactttaacagcgcagtggagcttgcggtagatgagtgtattcggacagaatcgttgaattggtttgcggtattaaagacttacgtagataaaggatatacagcaaactttatccctaactatttttatcaagtgatgattgcattttacaaagtggatcaagtgtatttcaaacagcttgtctcagctttatggaaacaatataagagtcagcctccttatcttgcttggattaaaaccatcaatgatattttcttgaatattgaagtgggcctctatgattattggcaagagatttcaactctttatcaagagacgtataccgacttgatggaaagtgatcattctgtaaaggaattgcatgaagtcattccgaacgtattaacaaactggcttaaaattaccaataagtcacgtgcgttatttccgtctgcggccgtgctttcatggaatgaaaagtttccgtcaactatcgataccattacaatcgaaaatgcaggcagattaatttttgaggcgcgtaacgacattgatggtcttgaatatcactataagctttgccatggcattattaaatgggctaatgaaaatggtttagaagtggggcacacctttaaatggtgggtagattttttattagatgctcatacgacacacttattaattacaggaacaaatgctgcaacgtcttcatttgtgggatcgattacggaagaaaaggtaccgcaaaatcacgaaacaacctttgtgttcattcatgatgaggaagaatctatccagcaaatcgctgatcaagaaatcattccgatggaaacgattgacggagcggagcaatctcctcaccaggcgcttgtagaagtgaaacaaccttttatgtttcttgagaagcataattgttcatgcattgttacgccaagctttacagaacaagaggcacgtgagcaggatgcatttaaatatgctcctttagcagatggtttactgtttgtgcttgatgcaaaagaatcgctgcttgatgaagaaagagaattattgctggagatcaaagagcatgcgccaaatacgccagttcattttgtcatcaataatatggacagtctttataatcaagcaacgattgagcgaattacaaaagaatttgaagcaagcattggagctgatttcccgcaggcgcatgtattagcctatacgcctcactacgtatcgagtcagcaccacggagacttggctcagtttattaaagctaatttctattacgatccaaacgaagttggagtagaagagcgtgcgcgcagactgttgttcttcattcaaaacatgctaaagagcttagtggagaagagaaatcaaacagaaaatcatttgatcgaaagtattaaatggaacgaagatatgcttgtacgattaaatggcttcttgcatcgagtggatgacttagaacaagaaaaagcaagcagtattgtttcggcttatcacggcatcaaagaggatattagcaaaaagctaaaaaataaaattcctcgtttactcaaaaagtcttcagaattagtgaaggaagacagtgattttagtacggttcatattgagctgaataaacaaatgaatatgcgcgtggaagagcacttgcagcaagatgtcctgcccaagttccgcatttctttaaaggactggattgctacatcaaatgaagagctgattgcgagtcaagtagatattgaagaagtagcagagtcattaaataagatgtacaatgagcaaaaattaacgttagcctgcgattttaaagtgctggacgactggcgccgcgacgttaatcgtatggctaatcgggttcagctggatgaagaaaatattttacttcgcgttaatccaacgcagctcttgttaaaaggagcaggaaaactgttttcttccattcttcaaaaccaaacgctgctttataatcaatataaaaaatacattgaaagtcaagactatcaagatatcacggaatcaatgctggcaaagttttttatgcaatttaatttatttgagaaaaatttagaagttgatattgaactattctttgaaaagccaaaagaggttttaaaagaaacgattgaagaaacacaggcgcatattaatgaaaatcaagacgtgttaagtcatatgaaagccaatcctgaagcttactatgatccgttaacattattccagcttcgcttgcgtcagtatgagttaatggttaaagctacagaagaagtacactacaacgtataaaaggtggagcaggatgtatttaacgataaaagaagcagcagagtatctatcttttcctgaagaatatgtgcagaaattgattcaagaaggaaaagtacgagctatatttgatggtgaaaactacttattaaataaagagcagtttaacacccatttagagcaaatggaaaagtacaaaaaacaaattgaagaatacttaaatgagcctatccctgaagatatggacgtaaaagatgaagattgaaggcagaagcagaaaacagatgttttctgcttttttcttttggagtgaaagtgttaaaaaaggtaagatatgaaagaaatgtcgaaaaaagttggaatttcgttaaagatgtagtctttttagatgctttttttatataatgaaagtatgctaaacaaaaaggagaaggtctatgcaacgatcaagacagttaaggctgattttattgcttgccctgattgttgtcgcttcgtttttaattattattatttcgaaaacacatgggattataagtcagcaaacgacaaaaaaagtagaaaacacaagcgttgcaattctcacctctgatgtactgacggatcaaagctggggcagtctagcttataaaggaaaaatcaacattgagcagcagtatcctgtttcggctcaagttattagcgaagtaaatacgaaccaaaaaatgaaggaagctgctgaaaaagttattcaaaatggaacaaaagtcgtaattggacatggaagagaattttctaccgtttttacagaactagctcctaagtatcctcatgttcatttcgtcaccattcacggtacttcaatgtataaaaaccaaactgtatatacatttgatcaaacaaaaatagagcacctggcaggcatggcagctgccatgaagacaaaaacgaaaaaaattggattactcgatacatttgcaaaagaaaaaaatccaggatttgaacaaggaatcaaagcgtatgattcatcgattgctttttattatcgagttgtaaacagccgagacgatggagcaaaagcagtaaagctgctccgtgagttaaaagatcaaggtgttgatatcgtctatgctaaaggaaattcgtataatcaagaagttattcaagaagcaaaaacacaaggaatgtacgtaatagggtatttagatgatcaggcgtacatgggtaggtctgttattttaaccagcgtgatcaacgatgttcctcaagcttacaacgtgattatgaaagactatttcagtaaaaaaggtcttccatctggagaagtcaagcttgacgctagggatggtgtttataaactagcgccttttggaccgatgtacagtaaacgggaaaaacaaattttatattcgaaagttagaatgtctacacagccgaagtaactatgaaaaagaaagagatgattatgaatcaattatttcgcaacatgtcattccgtagccaaatattaacgattcttcttttgattacatttatgttaagcgggttctctttagttttagtacatgccattgataaaatgaatcatgtaagcaacgaaattaaagatgaagatgttcctcaaatggtgtggctttcttattgggaagagcagctgaacataaaagaatacattgtgaaaaataatctaaagaaccccactgtctctttgatagaagaatatcaatcatatgatacaagagttattgaagacaatgaaaagtataagcagcctgtgccaaaatcgttgattccactgaaggaaaaaattgagctgcttgattttaagatttctaataacgtgcagggactgttgaagtacggagatatagagggagcaaaagagtatcttaagagaaattatttgccggatctgcaccagataaaaaaagatattaatagttcaaaagaagagacggttgattcacttgatacactatcagatacactgtctgtcattattaaagattcattatttttactattaattttaaccgtaagtgctattgtggcttctctttatgtttcttatcgcatgagtgcgagccttacgaaaccaattgaacaaatgattgaaaaagtgaatgacattgcagacggagaatacggtcttgttcttcaagacacaaagcaaattgagctgaagcagctttcggcttctatcaatcaaatgtcggttagtttagaagattcattttggaaaatcattaaagataaagcgtatcgccagcagattttaaattcactgcctgttggaattatcacaatggaagatgagacaaatagtatatttgccaatacctcagcaaagcagtttttagatctcgacgaaaaggatatttgcgggtatatggaagaatgtcctgaatataatactgaattttggagcatgttgaattcgggagaaattcacgaaaataaaaaagtgttatttggcacgaaagatacgtgctattgctttttagtctctcaaacgcagctgtttaatgagaagaacgagagcatcggaagaattttttattttattgatatatcggataccgaagaattagaaaagcgaatgcatcagtctgaaaaacttgccctggttggagaagtggcagccggagctgctcatgagattcgtaatcctcttgccgtgattcatggatttatatctcttatgaatcagtctctttctgatgaggagaaaaagcgtttttacctgcctctgcttatgaaagagctagagaggattaattacatcatcgaagaaatgctgttgttatcaaaaccagggactccggtgatgaaaaaagtcagcatgcaggatattattaacgagctattgcctttgattactcactcaagtaaatttacagaaaaagataagcttatctttgatgtgaaactgcagccgcatatactaaaggtagatgaaaaacaaatcaaacaagttcttcataatttaattcgaaacagtatggaagccatggatggtgaaggagtcattacaatctattcacaggttcatgatgataattattgtctgtatattgaagataatggaaaaggaattcctttgcatatgcagcagtcgctgtaccagccgttttccacttcaaaagatagcggaacaggtcttggtctgccaattgctcagcgtattctagaaagccacagaggacagattaaattattatctacttcttcccgcggcacagtttttgttattaaacttcctctacattaagaaaacagcctcaaaagggctgttttcttaatgtgccgttaaaataagaggaccgtttttcgtaatcgcaagcgtatgttcaaattgagcggataatttaccatctgttgtacgagcagtccaaccgtttttatccattttagaatgccatgtaccagcgtttaccattggctcaattgtaataaccataccttcttttaaacgtgtacctttgccagcttttccatagtgaagaattgtaggcgcttcgtgcatggtatttccaattccgtgtcctgtgaagtcgcgtaccacagagaatttttcgccttctacatagctttgaatagcgtggccaatgtcacctgtgcgatttcctggctgtgcctgctcgattccttttaaaagcgcttcgtatgtaacatctactagacgctgcgcttcgtctgaaatctctccaacggtatgagtccatgcggaatctgctaagcctccgtttaaatttacaaccatatcaatggttacaatatccccgtcttttaacggtttagttgttggaaaaccgtggcaaatttcatcatttaaagaagcgcacgttgcatattgatatcctttgtatcctttttgttccggcgttgctccgtgctttgctaagtactcttcaacaaatttatcaatttgcattgttgttacgcctggtttgatcattttagcgatttctttatgacaagaagctaataatttacctgcttcgtgcattaaattaatttcgcgttcactttttaatgtgatcattgttgttcactccttttttgatgtaactttacgaaaaaagttgagcagcggttatagcgatggaagtcgactattcatcagttcattcttctttatttgaaaatctaagaaatacaggaaccgtctgctattgggcgatataaaatcatccttaatcataacgcccaatggtaggaaaatgcaagatgcaggctttaaaaggaagggtttgacgataggcatgtagggaaaactgataaatgaacgttgaattggagcattctctataacaaatgcgatatgatatagtaaaataaatgaaacaaaacaattctttaggaggggtataggaaaatgagtgaacatggaaaatttattgggtttgcaggtacatatacaaaagcaggcagtgaaggtgtctatacatttacgttagatacgaaggctaaaaagattgtagaagtaaaagccgtggctaaaattgaaaatcctacatacttaaatgcaagcaaagacaacaaacatctttatacagttattaaagaaggagaaaaaggtggagtagctgcttttaagattgatccaaacacagggcaattaaaatttgtaaacagacagctgctagacggtgcgcctccttgctacgtttcagtgaatgaagataatacgcttgttttatctgctaattttcataaagggagcgttgagacgtattctgttaatgaagaaacaggagaaattgaatatgtagcatccgtagtggaacatcctcattcagacctcaaaaaaggacaaaaaggaaaaccacacgtacactatgccgattttactcctggagaaaagcacgtggccgtagtggacttaggtattgatgaaatcgtgacatatgaagtggaagataataaattgaaggaagtcaacagtctttctacatctgttggttcgggccctagacatttaacgttccatccaaatggccgctatgcctatgcaatgacagaattcagctctgaagttttatttttaacttatgacgaaagcaaaggaagctttactcaacaacaagctactttagcgatcccggctgattttacagaaaataatcaagggagtgcgatccacatttcttcagacggccgctttgtctatgcaggaaaccgcggacataactccattgcaacattcaaagtagatcaggattctggacagttaacattcgtagaatggacaggaactgaaggcgactggccgcgcgattttgttttggatccaacagaacaatttattgtggcttctaatcaagaaacaggaaacttggtactgtttgaaagagaccaagaaagtggaaagctaacgcttcttcaatctaacgtcacggttccagaagctgtgtgcgtaaagttcctccactacaagtaatcgatgtagaaagtcagacctgatccaaaaacaatcaggtctggctttctaaacctaagcggatgtcactccccttgcggggttagtgccatccgcttaggtgaacctttgagggaatagtcaggtagtgcgcgttccttagcatcatttataatctatctatatatggaagaaaagcccttttggagggcttttttttctggggttatagtagaatgaagagagaacgcatgaaaggctgaggtgataagtgtgaaaaatatatgtgattatccaattgtacaagctcccatggcaggaggagtttcgacgcctaaactagctgcagcagtatctaatagcggagggctagggtttttagctgcgggatataaaagtgcgcgtgaattggagcaagaaattacagagatgcactcacttacgaaaaaaacttttggagtgaatctgttcgttccgacaaatgaaaaaatagcagttgatgcacttgattgttaccaaaaagaactgtcaaaagcagctgaatatttggagtgtcaagttggtataccaaagaatgatgatgatgaatggaatgccaagctcgacatcattcaaaaacatcgagtacctgctgtgagctttacatttgggtgcccggatcgagagattgtagcaagtttaaaaggaattggaagccatgttttcgttacgattacaacacctcaagaagccgaagtggctttgagagcaggagcggatgccctatgtttgcaaggaattgaagccggcggccatcgatctacttttttagagagttcggtggattacccgcttatgaaattgctaaaagaagttcgctcaatcactaaaaagccattgattgctgcgggagggttgatgacgggatctgacatcaaacgtgtgttacaagaaggagcttctgccgctcagttaggtacggcttttatttgttgtccagaaagcggagcgagtgctcttcataaagaaagcattcttcaaaagcgttttaatgaaacaggtgtcacacgagcttttacagggaaacgtgctagaggatttgtgaatgccttttttatttcctatgataaatcagcaccatccgcctaccctcatattcattacatgacaaagcctattcgagcaaaagctacacaaatgaataattcagagtatgcttctttgtgggcaggaactggatttacgctggcaaaagaactgcctgcacatcttattgtggaagagcttgtacaagaactaaatgaatgatgagaattaaggtgttgcttgctttaagcgcaagcagctttacataaagaaggtgaacttatagtgcaaaacaaatttacgattggacaaatggctagactgcatgatatttcggttaaaacacttcgctattatgatgaaattggtctatttgagccttacgaagttgatccacaaaccggttatcgatattatacgttagaacaatttaagaaattagatatcattgtctatttaaagctgatgggagttccgttaaaagaaattaaaagaaagatggagcacagcagcttggatgaatttattgaaactttagcggaatatcatcaggtaacaaaagaaaaaattcgtcaccttcaaagagtgaatgcgcagttaacaactcgaatgaaggaattagaacagacgagacatattaaccaaataggagccccgttcatcaaacacctttcttctcgtgaggttgttcaagtaaaagcggaggtaggcacgttagacgggactgaaagtgttctgcgtgatttaaaaaagaaaattagtcatattaccccgattatgattgggaaagtagggtttatgctatcggtagaaaacacgaaaaaacaacagtttacagattacgatggcatttttttattggtcgaaagcgatatttcttttaagcatgaactcgttacgttaatacctgaaggcgattacgcatctatttatatgagagaaaagagagataccacaggagtctattacgatgcgttactgaactttattaaagcggaaggatacaaagcagaaggaccttttttaattcggcgaattgtagattcctttatttctcatcatgaagaagagcggctgactgaaattcaaattcgaattacgtcttgactatccagtagctggagggtttaagatgagactattgtagaactgctgaagggagagacaacaatagatgaatcaacaaagtatttcccaaggaatgtctttaagccgaggaaatcgcattttatttattttaattttgggttcactgagcgcatttggaccgttatcaatcgatatgtatttgccagcgctgccgacgcttgcgaaagaattgcatacttcagcttctttagcgcaggtcagtctgacagcttgcttattgggcttagcatttgggcaagtggtcatggggccattcagtgatattcgcggaaggaaaaagccgcttgtagcagcattaatcacctatgcagttgcatctgttttatgcgtgtttgcaccgtctatttggatttttatcgttttgcgatttattcaaggtatggcaggagcagcaggaatggttatttcaagagcaagcgtgcgagacttgttttcaggttcggatttaacaaagtttttttctatgcttatgctcgtaaatgggttagctcctattttggctccggttgctggcggacagctgctgacgattatgtcgtggcgaggagtatttggtgtgctagcagtgattggtgcactaatgttttttgccgttttatttggtttaaaagaaacgcttccgctcgaacgccgtaaagaaggcggattaacagaagtactgcgtacatttggcgtattgctaaaagatggtgtctttgtgggatatgcgctggcgcaaggttttattatgagtgccatgtttgcttatatttcaggttctacatttgtccttcaagatatttatggcctgtctccgcagatgttcagctttgtttttgctattaacggttttggactcattatagctactcaagtgacaggacgtttagcgggtaaaataaaagaagctactcttcttatgtatgggttgcttcaagcagccgttggaagcgtgattttagtggccgtgattgctactcacatgtccgttattttggtctgcatcttgcttttctttgtagtatcgagcgtaggaattgtgaacacaaccgttttttcactcgctatggaaaatcaagcttcgaatgcgggaagtgcttcagcgcttctagggttgcttccgttcttgctcggagcagccgtagctcctcttgttggtcttggaggagggcaaaatgctctgccgatgggcattgtgattatggtctgtgatttattagcattaggtgtgtacatgacgttagtgagaaggaaaactgcatcataaaaaagctacttggctttcaacagccaagtagcttttttagttattgagctttgtgctcgtgattttcaaacggtattgtaacgccaagcttttgaatttctttttttgcattttccaaaatggtttcagctttcgcttttgtttcagcatctaccccgcttagaaaatctttctttttatcaggaaaattcacgccaagttcctttaatttggcttccgcttgttccttagtcagcgtgccgtcgcgaagctgatccataatagccttcgcttttttctttgtagccgcatctaaattgttaaaaggaccgcctttatgttcaggcaagttcacgccaagttcctttaatttggcttccgcttgttctttagtcagcgtgccgtcgcggagctgatccataatagctttcgcttttttctttgtagccgcatctaaattgctgaaggggctgtctttgtgctgaggcaagtttacgccgagtttctgtaatttttcctgtgcttttttcataatatcatcaactttttgttgtgttgcatcatccatatttgttgtactgccatttgttcgctctacaactgttgaagagcttgtttcatttttgcttgctgcaaatgccgtggaatttgcagctgccataactcctagtgttaaaccgcttgccatgatataaccgaatagtttctttttcatgctgttgtcactccttaaaagttataggggtgtggtacagagctgtccacaattgttaatgtaaccaccaatagtgaaaaaatggtgaaaatagataaaaaacgaaaaaatatagacgtgtgttgaacactacggctcttttattggataacaaaatgaaattcgatatgattttatctaaacagcagcaaaaaagaatggagactttatatagatgaacattcttaaaaaattgggaatagctttgatagttgcgatagcggtaagcctggtatttttgtttcgcgatgagttaaagcctgggccaacgctagaagatttttcaggagcaactgagttgcatcctgtcgtagaagaaaagaaaaataaacttgttcaacaagcaagtgaccaaggaatctcaattgtcattacggaaggtttccgttcaaaagaagaacaagataagctttatgcaaaaggcaggacggaagaaggcaatattgttacctactcaaagggcggccagtcttatcataactatggactagctattgattttgctattcagttaaaagacggacgagttatttgggatatggaatatgacggtaacaataacaatcagtctgattggatggaggttgtagatatcgcaaaaaatttagggttcgaatggggaggagactggcaaggttttaaagactatccgcattttcaaatgagtccggaaaatataacaaaccgcacacgctaacaaagcgtgtgtttttttgaggggtaatataatttcgctatatttatgtcagaacctctaacacgacttaaggcttgtactttctttttttattaatttatagatactaggtttttatatatcactataacaaaaatgccgataggaagttagtaagaggtaggattgtagagaactgtttcataaaaacgaaagacaattcgtataaagatacgcgttaactaatataatctattgattaagcttatacaagtaccttcagcctagcgaacgtatacttacatatcggcagctaccgacaaaaccttttgtttttctagcatattttatttgaagatagttcattttgattacaaaaaagagataatttgtcaactattgactttattctaagggtaagaatataatttttaacatattttaaaaattttaaatatttaaacttttacagattaggagggagaaaatgattgtttttaagggagtgaataaatattacggtgattttcacgtactaaaagatatcaatttaacaattaaaaaaggcgaagtagtcgttgtaattggcccttcgggttcggggaaaagtacgatgctgcgctgcataaattatttagaaacaatatctaatggacagttaacggtaaataatatattggtcgcggataaaaaaacaaatattaataaactgcgccgcaatataggtatggtgtttcagcatttttatttatatccgcataaaacagttttagaaaatatcactttagcacctatgaaagtattgggacagtcgtcagaagaagctaagaagacagccctatactatttaaataaagtcggaatcggtgaaaaagctaacgcctacccgtcccagctttcaggcggccagcagcagcgtgtagctattgcgaggggacttgcgatgaaaccagaaattatgctttttgatgagcctacctctgctcttgatccagaaatgattggagaagtgctggatgtcatgaaaacattggctaaagaaggaatgaccatggtagttgtaactcatgaaatggggtttgcaaaagaagtagcggaccgcattgtatttatggatcaaggaaaaatcttagaagaggcaactccggctgagttttacgaaaacccgcaagaagaaagggcacgtttatttcttagccgtattttaaatcattaattgtttaatagggggagtaatatgaagaaatcaaaaacgtttttaaaggcagctgtgctttcattagcagcggctatgatgttagcagcttgtggagggaaaagtgaagaaacgagtggatcatcagctaaaaaagatgcgctcactgaaatcaaagaccgagggaaaatcgtcatcggagttaaaaatgatacgcgtttgtttggcttaaagaatccaaagacgggtgaagtagaaggttttgatgttgatatttctaagcagctggctaaagagattttaggtgatgaaaacaaggtggaatttaaagaagttacgtctaaaacaagggttcctcttcttcaaaaaggagatattgatgctgttgttgcgacaatgactattacagatgaacgtaaaaaagaagtagactttacggatgtatatttccaagctggacagtctctgcttgtgaaaaaaggcagtaaaattaaaagcgttgatgatttgaagaaaggtactaaagtgttggctgttaaaggatcaacttcagctattaatattcgcggaaaagcaccagagacaacggtattagagtttgaaaactatgcagaagcatttacagctttaaaatctaagcaaggagatgctttaacaactgatgatgctattctttatggaatggctgatgaagatccttcttatgaattggtaggaaagccgttcacagaagagccttatggcattgctgtgaaaaaaggaaacaaagagctagtagatgcattaaacgatgcgcttaaaaagataaaagactctggaaaatatgatgaaattcacgacaagtggatcaaacaataagcgtacagttttcttttctcaggatgagcagcattatgctcatcctgcttgtttagttgaaaggaggaagaaaattgttggatttttcaattctgacgaacaatatggatctttatttagaaggttttaagtacaccattatcgccagtctgattgctttagtggccagttttgtacttggtacaatcattgcggtaatgcgaatagcccctctcaaaatagtaaatgtaattggtacggtctatgtagagttcattcgtaatattccacttgtggttatcgttttttttatttttatcgtggcgggaatcagcggtacagcggccggagtgctgggactaactatttatacggcagcttttatcgccgaagctatacgagcaggaattatggcggttccaaaagggcaacttgaagcggcacgttcatccggccttacgtacggtcaggcgatgcgattcattatattgcctcaagccattaaaatcgtcattcctcctctagggaatcaatttattaatttagtgaaaaactcatccgtgttagggattgttgctggttttgacttaatgtatcaggcagatcttgtttcctctcgaacgtacgtagtgtttgatgtgtatatttttgtggctttgttctatttagttctaaccattccgttgagtttaggagtgggttatcttgaaaaacgtcttggtaaagcaagctgaaaggagtgaaagtgatgaattttatgggtgcttattctcccgatcatctttccttcttaatggaaggattttgggtcactttaaaagtagcattcatttcgattgtattaagttttcttattggaagtatagtaggtattttaaggtatgcccgcattccagttctgtctcatgtactcgcttttatcgtagaaattatccggaatttgccgctgcttttaatcatcttttttacatactttgctttacctgaaattggaattgatatggaaattacgtcagcagcgattgtggccctcactgtatttgaatctgctatgatttcagagattatccgaagcggattaaaatcaattgaaaaaggacaaatcgaagcggcgcgatcatcaggtttaaactattatcaaacgcttcgtttcattgtgctgccccaagctttgcggagaatggtacctcctttagttagtcaatttatttccttattgaaagatacgtcgcttgcagtagtgatcgcacttcctgatttgctgcataacgctcaaatcatttacggccagaaacaaagttacgtggtgccgatgtttctaatcatcgcggtgatgtattttattgtaaactatgctttatccatcattgcacgaagactagaagtcacaagggtatagatactcttgtgactttatttttggaaaataaataacattgacaatgtattgattcaacgcataaaatgactaaagtaacagtggtaaaatcagatcattttcattcatcatagagaagaaaaacagtgttggttcaccccctactgaatatccggtagggttttttgcgcaagaagtgatttggttaaactaacacgtaaaatgaacagaagggacgggcatcatggaaaaacaagatcaaaatttaaaaaaaggtctgttgcctcgccatgtgcagctcattgcgcttgccggtatgattgggacaggcatttttaaaggcagtgctgatacgctaggtattgcaggaccaagtgttgtactggcgtatttatttggtggtcttatcttatttattgtaatgacagcattggcggagatggcaattgtctatccgaatatgaacgtacaaaatttagtgcataaggcattcggtacgcaaacctcttttattgtagggtggttgtactgggtgaactggattgtcgtgacagttgttgaactgctagcggggggaagctttttgaagttttggttcccttctgtacctctttggctcttaagctttctctgtgcagtgctgattgtagggatgaatttatttcaagtgaagtattacggagaaattgagttttggtttgccggtattaaagtaattgctcttactgcttttatcattttgggagctttcattttattcggtgtaattccaagtgatgtgcaaaacccttgggcaaattatacggctcatggaggctttttccctcacggcatgagcggtgtgctgagtgcctttttaattgtaatgttctcttacggcggagctgaattaattggtgtggccgtaacggaaacaaaagatgtgaaaaacgtcttaccgaaagtgatcaaaggcacagtatggcgagtgattggtttttatattttgcctattttaattatttgcggccttatgccctggaattctgtatccggacaagacagtccatttgtccaagtttttagtatcaccggactgccgggtgcggctcatattatgaacttcgttttattgacggccgttttatcagcagcgaattcaggaatgtatgcaacttctcgtacgctctatgctatggctcaaagcggagaagcatcaaagcgcttcttgaaagtttcgaaaaacggtatcccgattaatggtttgatgattacggctgtttgtattttaatgggtgtgtttttagcgtataagacgccggataatgtaattagttatttaatgactattccgggtttcacgattattcttatttgggtaagcatatgtttagctcaattaaagttgcgtaaagggtataaagaaaagccgttttttgccttgaagtggtttccttatacaacgctttttgcaacagcagcactgcttgttatttttgtatcgtttatgtttaataaaaacaatgtgattggatcaagcgtatgtgcagttattctcgttgtactcctcattttttcatttattaataaaagtcgaaaagaaaaaaagtttgaagtatagcaaaaaggcaatatactagaaagacgagggtaaaagcttgtctttctttttttgcggaagtttctgtatcacgttacatatttctagatgaaatgtttagttaaataaataaaggatgaggactataatggaatcaaataatgtatttacaacaaacccaaagaagaaatcaaagcacttagccgtgatttctttggcgattatgggagtgggcttcgttgccacaatgccttttggtgattcgatttggggacgtttgcttcaaggtggattcgaagctggattagtcggaggactagcggattggtttgctgttacggctctttttcgtcaccctttaggcattcctattccacacactgcgttgcttcctaaaaacagacagcgtattacaagagggttagtctcaacgcttgaaaatgactggctgtcaaaagaaagtattcaagaaaaagtaaaaagaattgcgtttacaaagcgtttgcttccaattgttcgaaaaggtgttcattcggaaacgattcaaacaaaaggaacagcactgcttgttgatgccattaatcgtgtggatacagagaaagtcgttcctattattgaaaaagagcttaaatcatcgctttcagcaatagagttaaagcctattgtgcattcgattgttggagaagtggtaaaaaatcagtatgataaaaaagcgcttgatgttcttttaaataaaggagagagctggattaaaaaagaagaaacgcagtatcagctcggaagtattgctaaaaatgcgcttgataatattgagcttgatggtattttacaatttgctctcaaatcatttcaaagcatgattaatgaagagaagctagggtctattttgcaaaatttattgctttctattacagggcgtcttcgtaacgaagaggatgaataccgccttgctttggtaaatggaattagaaaagagctgcaaggcttggagcagaatgaagaacttcttgaaaaattagaagcatggaaacaaaaaacgattaatgaattaaatgtaacgaataaattaacagaaatcgtcgataaaatgaaagcgaaagtgacagtattcattgaaagccctgaatttatgaaaagctacgcggttccttacgcagagagctggctgaatgctcttgaaaaggatgcacagcgtcaaggagcaattgatacggctattcaaaagcaaatcatgagctttgtagaagagaatcattcgaaaattggacagcttgttcaagaaaacttagataaattagatgatgaaacacttgtggatatgatggaaaacaatgtcggaaaagatttgcagtggattcgagtgaacggagctctatgtggattcttgattggtattgtattaacggttattaaattagcggtgtaaaaaaagaagcacgctccttttggagtgtgctttttctattaatcatctagttctacactgattacgttaccgtttttggcatctactgaaacagttgcttcacgtttatcagctgtgtcaatttcaatttcatatactaaacggttgttttcttggtctagatccgtttcattgacggttcctttagcactctttaaagctgtttttatcgcttgatctaatgaaatagcaggggaaatgttttgaagttcctcttctttctcatcttcatcgtctttttgctcttcatcaaattcaatgattttaccgctgctgctgtcaatgtctacatcgtattctttattcccttttgtgacgtctacttcatattgtttaacgccgtcatctatggctaattggatatttgtaatgtcgccgccgtctgttttttgaagggcaatgtcttttgcctttgcttcttcaatcgttgtggtttgcttcttatcattgcttttagactggtctgtcattgcatatgcgcttgcacctaatccaccgactagtactgcactggctaaaacggttgtaataactttcatatgttatggcctcctcgatttgttgttaaaactatcttagccaatgaactttaaaggaaaagaagaagaagtttaaaattttcttagaaataaataaaaatggataaaaaaagcacagctttccgctgtacttttaatcatcgtcagtttcataggtgatggaatctacatgtccagagtaagcattgatcatcactttagcttctcttgttttagactgatcaatttcgacttcgtagaagatttggccttcttcctcttctatttcaactgaggaaaacgttccttttactttttgtaaagcaatgtctcttgcttgttccattgaaatgagaggctcgtcggatgtaggagaaactggtggctgctcgctctttttttgctcttcttctatattatttttagtttgagtagacgtttgtttctctactttttgtttgattaatgactggacttctccattttctccatttactgtgatgtggtatggaatatcatttttaagcaaagtgattcgataaatcggttcatcatctttttgggaaaagcttgcattttcaatagtgccgccatatttttgctgaatcatactgctgacgtctgattccgataaaattgtatcaggccgattcactgcttttgctattccgtaaaagcaagctgaaccaacagcaagaaaaataagtataaaaagcaccgttttcttcatacattcacctccagtatcttaaaaagtagtatagcaggcaattcttaaaaatctctaagaaaaggcgagaaatcaaagaggaaaggaaaccgttactgatgtcccttttccttcttggctgttaatctcaatacgtccgctatgggcttctacaatctttcgagcaatggataatccaagccctgaaccaccggtttctcgatttcttgctttatctacgcgaaaaaagcgttcatatacgtttgataagtcttcttttggaataccgattccttgatctgtgaccgtaatcataaagctttcgctttttgttatagttacttccactgctttttcactatatttaatggcattatctaagaggatgtacagcagctgctttaagcgtttttcatccgctgttacgacgggatgatccgtttttatatttaaataaatggttcgttcaaaagcttgttctagatgcttgattgtttggttacagacggccgccgcatctacgtgttccatgtgaagcttccactgcgactcatctttcgcaagcaccagcatttgagacgtaagctgtttcatgcgtaaagactcagagtgaatggcttcgatggcttcttctaaaatatctggacgcttcattccccatcgttttagcatattggcatagctttctacaacggtaaggggtgtttttaattcatgagaagcatcggatacgaactgctcttgttttttatagttttcctctaataaatccatcatattattgaaggtattggccatttgatctaactcatctttagaagaagaagagagatcaatttttttaaatgtgcgagacacttgaatttcttccatagtatgaataagagatttgataggccgcaaaataattttacttaaaagccgtccggcaaatatggtcggaattaatataacaagagaggcaatgagcaagataaattttaatgtctgcagagattgttccacatctgccagctgttctgtgacttccaaagaaacaacttcgccgttcgtccaaatgacgggggtatgcgaaattgcgtataggtggccgtcgtcttctttgattgttgtttgttcatttgaataataagaataaggcaagtcctgaagctctttcgtttgatcagtaaccgatacaactaaaggaccccctgatttaggcaaaatgcgaatcattccgttaggaggcaaataggcacgaagcaaattggcttgtttaaccgtcgcactcgtttgctttagcccatttgttacattgcttgtttctgcttgcaaacgttccattgcgttgtcttccatggttttcttgaaaatgaagtaaatcgaactgtttgcaattactaagagaataaaaagcagggcggttgatgtaaggataatctttgtttgcagtttcataagctactccttcagcatgtagccaacgccgcgcactgtttgaatataaggtgttgaaaatggtgcatcaatctttttgcgcaaataacgaatgtatacgtatacaatattggtgtctccgtagtaatcaaatccccacacgtttgtaagaagctgttcaaagctcagcacttgattgttgttttgaagcatatagacaagcaaatcatattctttaggagtcagctcaatagcttcattttcacgcgtaacttctcgcgttttttcgttaacgactaaattgcctagttgaagagtggctgtttcttgttcagcagtcgatgttgatgcaggatggcgaagccatacgcgaatgcgtgcaaaaagctcttcaatttgaaagggctttgtaatgtagtcgtttgctcctaaatctagtccgcttaccttatcaggaagggcgtctcgagctgttaataagataacgggcgtttgatcatcatttgctcgaatgcgacgaagtacttcgagtccgctcagttcaggaagcatcacatctaaaagcagcaaatcccaatcgtgttcttgaaactctgccaatccttctgttcccgtgtaagccatgcccgtttcgtacccttcatgttcaagctcgagctgaattaaacgagcaattttgcgctcatcttctacaattaaaattctgcctttactcaacaaaaattcccccttgtgtctatgtatagttgcgtacattatagcacggagagattggaggtgtataaaaacagccggaggttagtccggctgctgatctactgaaagaggaaggtgcaagataatggcagtgccttcgtgaagagtagatcttacttcgatatggcctttatgaagttcacaaatagcctttgcgatgctcatgccaagtccagcaccttctgttttttccgttgtatttgtgccgcggtaatagcggtcaaataaatttttctgcgtttcttcatccattccaattccatcatcttgaatcgtaatcaagacgcggtcactttttatcacggtcgaaattgtaatggtagtgttcttagggttatgtttaatagcattaaaaattaaattatcaagcattcgttcaaaccagcgcgggtcagcttgagtaaaaggttgaagatgagcgggcacataagagaagtgaacattttcaatggttctatcgttaacgaattttaaaacaatatgctgaagtaattgatgaacatccactttttttgtttctaaaacaaccacgttatttttaagcttaaaagccagtgaaaaatcctctacaagctccaccatgtattcacttttatcacggagtgtttggccaatttcttttaactcttcttcgttccaattgtaatggccgctttcaagcatatgcccatatccttgaatcgtcgaaagaggtgtgcgcaaatcatgtgatattcccgtcatccattcttcgcgagtagtttctagctgttttcgttctttttcagctaagctaagctgctccgccatctcataaaaagctgtgattacttctgaatacaggcgatattgaaagcgtacttttccattcttccgaaagacgcgcttccgctctttttctgttagcacttctgaatagtttccgcttcccatgcgcccgagccagctggtgaagagaagtaagggtccgccgtagcgaaaagcgttccagatggagaaagcgatggtggctataagaacggaaacagccacgatgatggagatcatccaagcttttcgaataatagattcatcagttatactgtggtgattattgggagtgtaaaaaatccatgaaattttcttcttcgagtcatggaatacagtagctgttgaatcatatttatcttgttcaatttttcgggaaataatttctaaaggatcgtaacttgttttttctttagacattctaattgaagctaagatatcacctttatcatttaaaatttgaagcgaagcatttttttcttttaatgccttcttgataagaggaatatcgctttttggaggcacaccttccttattatagttagcatacatagcatatagctggtcttttaaatcacttttatagcccaaaatataataagtaggtgtagtcaaaaaggtatcaagttctgttactacattatagtctttaaattttttggttttatccatttctaataactctgaaagaccgtagtgcttaggtaagtcttttggggagttaatttctccaattacttttccttgtttgttcagtacttggtaccatagtccttcttgtttaagttgttttgctaaatcatctgaaacggttgcttttccaccttcaactgttgtatccccggttaacacgctaagtgatccagagggtaagtctctttttatatcttgctttgaaaggtaataagctagaaacattaaagcgcaaaaaagaacgcagcaaacacatgcaataatcgcaataaactgaaatgaaaaatgaaaggtcaaccttcttttaatggatttcatagcgcttttccgttcactaatttatagccaagccctcgtaccgtaactaaatgttttgggttgctaggattatcttcaattcgttctcgaattcttcgaatatgcacggttactgtattatcgtctacaaactgattatatccccagacggcttcaagaagctgtgatttagaaagaacaatattcatatttttacaaaagtgaagaagcaataaaaacacttgggcggggcaagaaaccgtttgaccatccacaatgagttctcctgccgattcatctacagtaaaacgatcaaactcatagcgatttgacgattgtggttccgttcttatagaagttccttcagtcagcacttgctttctgcgcagtcgtgctttaattcgtgccgcaatttctaaaggattaaacggcttagttacgtagtcgtctcctcccatggcgaaacccgttagtacgtccaggtcggatactttggctgttatgaataaaatatacgcgtttgagagctcacgaattttaggacagatatcaaatccgctttgatcgggaagcattacgtccaacaaaataatatcaattgtttgattatgtaaaacatccagcgcttcttgagcggtgtgagctttataaatttggttgaatccttctttttttaatactgtctccagcattttgacgatggcaacttcatcatcaactagcaatatagacgcatcttccaacgtaaatcacctctgtttcatttcatacgtattcgattttagcataagaacattacgaaaagattaacaaaattggaaaatgttaaggaaaagataatctcctggttattttcttgaaaacttcatttcatatactaaatgcacagacacatagtaaaggagttaaaaggatgagtaatgattttaggcgggttaaagtaattgatagtatgagaggattcagcttgtttggtattttactagcgaatatgctgatttttcaatatggcatttacggaaaggatatgattcatctcttctcgctatcaccaagtgattcagcagcctatgtctttttaaaagtcgcggtagaggaaagttttatgccgattttcacctttttatttggctattcaatggtgaagatgaaagaaagcttagaaagaaggaagctaggcgtaaaaaggcatttctttcgccgttttcttctgcttctagggtttggcttactgcatggagtgtttttatgggaaggagatattcttacgttttacggaatgatgggagtatttttactacttttctttttaaagcgtaaagccaaaacacttttggtgtgggtatcgattttgctggtccttacaggagcagccggatacggttcattaaacgataatatgtatcttcttagcgataaacaaacgcttacgacatatgtaaaagatacgattcatgtgtatggaagtggaacttatgaacagattaaagaccaccgcaacaatgttgatccgatgaatataacaggatataaatttgcttttgccttcttgtttacgccatttataatgggcgctttgtttttatttggtatgtatgcaggaaagaaaaagtggttttacgatgtttcagctaatcaaaaacagtatggccgttgggcagccgcgctgattccgcttggcttgctgttaaaagggactatgtacgtatggccagatgctaattgggctggttctacacatatgttaggtggaagtcttctatctcttggttatattgcaggctttgcttggttatatgcaaaatacgagaagtcatttttgataaaggcttttgaaagtgtaggcaggatatcgcttagtaattatttaatgcaaacggtcatatgcacgacgattttttacggttatggattaggttatttcggaaagctcggcatgattgcagggatttttgtctgtataggtatttacggaattcagcttatcggcagctatatgtacgtacaaaaatttcaaactggaccggtggagaagctactgcgtatatggacaaatttttcttggagtggaaagcccaaagaaaaaaaagctttaccggcggaagtaaatcatccttttgttggatgatagcagtcaaacttatttaaaaggagattttggaaatgtgggctattagtttaaaagagtttcaaagcttatttaaaagtattaaatcaattatcgttatcttaatcgtatgcggtgcttcctatggaatagcccatatagttagtcaacttggaggtcaactgacgagtgcacagattcaagatggagccaacgggggaattttggtgatgcttctcgggttcggacctttatttatttcaagtctttctcataatgttattaatcaagaaattaagacaagaacagcaaggtttttagttaccaaaacatcaagagagcgtattgtactagggaaattcttaggtatttgctgtttctggcttgtttgtatctctatttcatttctactgattgcgtttatttcgcatcatttttctttttatatatttttagagtgcctgctattcaccgtttgtatcatttcatttgttttaatgctttcagctttaatgccaagcccaactcatactatgtttttatcaattattttatcgtttgttctaccggtactgagcgtgtggagcatattttcatcaaaagcgtacattgcatggtttaagtatgtgacaccctactactatttaaagctggagaaagggtatctaacagttcttcttatttttgcagcactttgtttatgtacggcactttggagttttaaaaggagagaagtataatatgtatgctattgaaacaagtaagttaactaaaaaatatggatctaaaacagttgttaacggtattaatttacaggtatcacaaggggaaatttacggatttttaggaagaaacggagcaggaaagtctacatttattaatatgcttaccggcgtttcatttccttcagcaggagaatttacgctgctgggacagagtgatattgatttagagcttcagaagaaaataggtgtgcttcctgactatgctaacttttatgatgagatgacagcgctcaatcatttgcgctattttttaaaggtaaacggccatcgtttttcgaaagaatactgtagtaatgtactgaagaaagtaggactagaaggacatgagcatcagaaagttggaaagttttcatttggaatgaaaaagaagttaggaattgctcaagcaattgtagcagacccagatcttatctttttagatgaaccaacttctggagtagatgttgaatctgctctccacattcatgaactaataagagaactccaaaatcaaggcaagacaatttttatgacgtctcataatttaaatgaagttgagaagatttgtacacgtgtagcgattatgaaaaatggggtcattttaatagaaggtacaatggaagagctgcgctttcaatatcaagcgaaaaaaacggtgatgatcaaacatgatccttatccaaacagtcacaaagaatacattcaacagtttttccgcacgttgagtcccgaagttgaataccatcacatgtacacaaaagtgatgcttcaaaaagaaagaaatattcctcttattattcgcgaattgattcaatgcggcatcgacatttatcaagttcacgtcgaagaaccttctttagaagagatctttttgcaaaaaaatattgtggatcactcacaggtgagttaataggcgaaaggcgttgatttactactgagcttgagtacattatttataaataccagttaggaagcttctgacaaaaacatgttcattttctcaagaaactgataagatagctaatgacatttaaaaataagaaaggatttcgattatgttatcagctattaattcagtagattataccatcttccacgcggtgaatcagtatgcctcacacgtaaagcctctagattcgctgatggtattctttgcagattatgcccagtatgtacttatcgttttactcggcttgtttttacttattaataaaaacggcagccgtgttgtagcatttcaagctttgtgtgcttgtgcaacaggagtcattatcaataaagtgattagtttatttgcttatcgagatcgtccgtttatctctcaccacgtgaatcagcttattgatcacgccgcaaattcttcatttccaagcgatcatgctacatctgcattagttatcacttttaccatttggctgcatttcaaacgttcagggcgcatgtgggttgtcatgggtgcactcattgcattttcacgcgtatgggttggcgttcactatccattcgatgtgttaacaggagccgttttaggctgcgtgctggcgctgtttattcattatgttatttttaatacgaaaatcatgagagctattaccaatctgtctatttttcgaaaatcagcttatgacaggcagtctcaatattattaagaaaaagtcgcacatatgcggctttttttattgggaaatttttaatgtatttaatacttgttttttaaaattaaattgtgtacaattaaattacagaaacgataaatgaaaaacttttaatacaattactaaaaaagaggagagatttatacatgaaagctttatatgaaacaacagttgttaacacaggtggaagaacaggagaagttcactctttagataacatctttaacttagacgtggcaacaccgccagcgcttggtggagaagcaacaacagcaacaaacccagagcagctatttgcagctggatacagtgcttgtttcaacagcgcgttagaatttatgttgaaaaaacataacgtagaaatcaaaagcagtgaagtgaaagctactgttcagctgcttcctgataaagctgatcaaggagtaaaaattggagtagcgcttgaagctcatatcgaaggcttagatttagaaacagctaaaaaatatgtagacctagcccattcatactgcccgtattcaaaagcaatcagcggcaacgtagacgtaacggtagaagtagtttaattgctttaaaaagccctgctaagcatgtaaagtttagcagggcttttctatttgaattttctctattcatttgtaagcggtactagtataatgaagaagaaaatgaattattcgcacagtttaggtgctcttacatagcgtaagaggtaacagggaatcgagtgcaaatctcgagcggtccagccactgtaagcagggagttttctatcttatcgtcactcaaaacggggaaggcggtagaaaatgatgatctcaagccaggagacctacctattctgtacacttgactcttctaggaaagaggcggtgtatcaaggtacgcagtgagcaattgctgtttattttcatatgccgacacatcctcaatttctatagaattgaggcttttttacgttttattttaaaaaaaggagtgtaggaaatggaaggtttatcagtttttttacttgtctttttattaggaatcaggcacggattggatgcagatcacttagcttttattgatggccagactcgatataattggcgaatgggcagccgttttgccccgtgggtcggaatgctgttttcactaggtcacggaggaatggtggccgtcacggccggggtgctgggcgtggtgatgaagaattttacgtttccatcgtatttcgatcattttgcatcttgggtatccattatctctctctttctaatcgggacattaaacacatatcatttgcttcgaaccaaaaataaagaggaagagtttcagctgagcgggttaaaagggaagtttattccgaaaatcgcaaaaggaacaacgaatccttttttaattattcttgtaggagcattgttcgctttagcagccgaaacggtcagtcaaacggccgtgtggtctctagctgtagggaacgcaggcaagtatacgccgcttttgttgggactagtatttatgtttggtatgatgctaacagatacaatcgattcattgattgtacataaaatggtgaatgaatcgagtaaatttggacaatctgcttctcgcttgatgggctgggttattgttgtcctcgcgtatggtgtgtcgttctatttagcattcactttctttaacccatgggccgaagtaaactttgaaatggttggcattattctgtttgtttttttagtgtctatgtttgtttttgtgagtgtgaagtcaaaagggaaaaatattaaaataaatgtcaattagtcaaacgaaagctttaatctgttgaagattgaagcttttttgtatgaatttgttgaagtttatggctattttcggtcggttatgaataagttaaagtattatctgtatttaaaggatggaaaattgtctgaaaaccattataattaaggataatttaagatcgttatgtgaaacgtagaacatagttatacgtacgataaataaaagcatttaatgcaagcagcaggggttgtttggaggaggaattgatttgagtcaggtaatggtagaacaaagtgtatttagttatttaaaagaacacgaacaagagatgcttgaagatttagtcggatttgtgaaaaaagaatcaccgtcctacagcaaagagttagtagatcagtgtggaatgtatttaacgcagctatttcaaaagcgtttaggggtagggtacgaaatcatagaagaaaaagaagtaggaaaccatttgaaatttacgattggagaaggagaaaagcagcttttaattatcggtcactttgacacggtatgggaaaagggaaggctgagtctaagaacagagggaaacaagctgtacggtccgggaattttagacatgaaaggcggcattgtccaatctatatgggcgattaaagcgattcaagagcttggcttatcgctcgataaaaaaattgtgtttttctgcaattcggatgaagagattgggtcaatttcttctaaaaaatacattgaagaagaagcacaaagaagtgaagcagtgctagtagcggaaccggcggtggcgggttcaggtgcgttaaaaacgtcgcgcaaaggagcggggattttcaccgtaaaagtatggggacgagcagcacacgcgggtaatcaccacaaagaaggaatcaatgcgattgaagagctggcgcgccaagtgatttttctgcagagcttaactgattatgaaaaaggtacaacggtaaacgttgggacgtttaccggcggcagcggtacaaatgtagtgccggaatatgcagaagcgcacgtggatttacgtgtttctacagaagaagaagcaaaacgcatgacggatattattttgaatttaacacccattttaaaagggattaagctcgaagtaacgggaggtatgaatcgtcctccgatggtcaagtctaaacaaacggaagagctatttgaatgcgctcagtcaatcgcggcgaaactgggtatgaaattggaagaagcagctgtgggcgggggaagtgatggcaattttacagcggccattggcgttcccacgttggatggattaggagcatgcggaaaaggaatacatgcggaatatgaacatattcaaattgatacgttgtccgagcgttcttctttatttgcgaatttgctgctgcaaatataaaaaaagcccgcctcaaacggcggggactaatctcaaagcttatattgggagagtataagcgttctttttttatttactgctttcttcttgaagagaaaaggcagtttctttctttttgaataccactgcatcaagagcaaggaactggcttcctgcaagaaataagtgagcagacatggcaattaaggcaatatcaaactcaaacccgccaacaaatccgcttttaagcttggctgtaaaaatggcgccaagcataactgccacaaataaagcagatacgactcttgttgctaggccaagaataataagaatcccacctacgagttcaatggttgcaacaatatatgccatgaaaccagggattcctaagctatcgaagaaccctactgtattttcaatcccgccttgccatttttgaaagccgtgtactaaaaatgtaaaacctaatactaaacgaataataagtgaaccaatttcgacgtttttattcaatttacttcctcctttaagtgtatttgaaaaacactacattatgtagtgtaaaagcccgaaaaaagaaatgtagcaattaaatcagaaagtctttcttatttggataattttacaacattatgaacatcacactacaaattgtagtgtgatgtttgtcctcagtcaagtgaaaatataaaattagaccatttggcatacgaaaattttctgaagagtacttgaaaaatcctttaattatgtacaatttagtcccttattttcaatcttattctctaacatgctatactgatggcggaggtgtgacgatgcgtttagaaaataaaagagttattgcgcttgttagtgcagactttgaagatctagaactatggtatccagtgatgcgtcttcgagaagaaggagcagaagtacatttagttggagaaaaagcaaacgaaacgtacatggggaaatacggtgttccagccgtatcggactacgcgtttaaagatgttgatccagctgaatatgacgctattttagtacctgggggctgggcgccggataaactgcgccgctatcctgaagtaattgaaatggttcgtcatatggatgaacagcaaaagccaatcggccaaatctgccatgcaggatgggtattaatttctgcaaaaatcttagatggccgaaacgtaacaagtacgccaggaatcaaagatgatatggaaaatgcgggagctatttggcatgatgaagcagtcgtaatcgacggccacattatttcaagccgccgtccgccagaccttcctccttatgcaaaagcatttgctgatgtactagcagagcaataagaaaaaagccgaaaccacattggttttggcttttttataagatccgctaaaaaaagaaatgataaagtaaataaaaaagtatcattaaaaaagcgagcagatgcatctgctcgcttttgttcgtgtttcttatcagtaacttgcttttgcaagtgtaaaaacaaaatgattactttctttataaaatccatgattacggtttttgtatgtttcgttgttgttagggcacaattagcattgattgtgcttgcatggatttcatccattgccgcggtttgtttttccacatgatcgattaacctaaacgacgcaagccctacctctcttgcatccttacggctccgaagccgatccagtgtgaataagttttgttcaaagacatgtgtcgaatgccagtatttttaccttgcattgtacgatacatcctttcaagttactttcactatgtccagctcttaaagaaaagccagaaatctaaatataacacctcagttgatctatgtcaaatagaaaatgtgattttttcacgtgaaacaattgcagctaaaacatggttaaataaagggatatcttttttatatggaagagttttttgatacgataagttagaggaatcctagaggaggatgaaaaatgaataaaaatgaacagtttcgaaatgatgtattgagaagtgtagaatcattaacatatgaacaattaaatcaacagccaacatctaatacatggagcgttatgcaagtattagaacatttatatttgatggagcgcatgattgtttcacgtgtaaaggatcagttagaaaacggtgtggatcagccgactgaagataagccgtttcatttagcggtagaccgttcgcgaaaagtagatgcaccggctcaagttacgccttctaatgaaaagcagacattagaagaaatgaagagtaagctggcagaatcaagagcagctttaatagagctagaagaaacagcaagtgaagacaagctaaagcaaaaatcatttccacaccctgtgtttgggttaatggatttaaagcagtggattgattttattggctatcatgaaaagcgtcatcaagaacaaatagaagaaatcaaaacagcaattggtgcataaaaaaacaggcagtccgcctgtttttttatttttggaccaaaataggatagtccgacatcatccaaataccaacactatatgtttggggattatgattccctacggtagagcctgtttgaatcgtaaacgagagttgcagaggatcttgatcgtaataaatagtttgcttggtggaaggggaataaaggcgcttcggagggattttaggaaccgtatccgtcgtgttaacaaaacagcggctatttgaaacaagatttgtgtatgtttgaacgaattgaggatcacctactcgaggagctccgtagttgtacattgtaacttccggaaaagatgcgtttgtggcgacatctaaggcatgaagagcagcgagtgcaccacctaggctatgccctgttatataaagtggcttgggggtaagggactgatatgtttcaaaaatttcatcacggcatgattcgtaaacggctaaaaaaccttcgtggacgagaccggcttgttgattgtatggataagggcgctgccgaatgcgagcatcagcaatccagtctgcctcagattgagttcctcgaaatgcaattacgatagagtcatcagattctaaaataaaaccaaaccattcttgcacccctacggcagaagctttaaacgatttaataagccggtagccttcaggtacatcaaatgtgcctccctgtgcgtattgcttataagctaagacgcacgcataaagaaggtctagagctaaaggacgataaaataaaggctctattctcatcattgtttttcacaccttctaatagaaaataactcctatagcctatgtgttcctgagaagaaaggtgcagatacctctcttttgaaagcgataattacggaatgtaaacggtttatcgttggatgtttttgaggattttacaagtttttttgtatattttaactaaaaattagttttaatttagagttttattgttaaaatttataatttaacttataatttaaaatagtctgaatgtaaaataagggggttatcgtttggagcaatttgtaacgagtttgaataatgtgctatggagcacgcctgttatttatgggtgtcttgcgattggcctgtttttctcaattttaacgaggtttttgcaggtgagacacttaaaagacatgattatgctgatgtttcaaggtaaaagttcagaagcaggagtttcttccttccaagccctgtctctagcgctgtcgggacgagtcggaacaggaaacattgctggagttgcgacagctatcgcgtttggaggtccaggggctgtattttggatgtgggctgttgcttttattggtgcttctagtgcattcatcgaatcaacacttgctcaaatttataaagttaaacaagatggccaatatcgaggtggtccagcgtactacattgaaaaaggaacaggtatgaaatggtatggcattttatttgctattgcagcacttgttgcgatgagtatcttaatgccgggtgttcagtctaactccatcgcgcttggaatcgacaacgcatttggcgttagtccaacgattacagcagtaggattagttattattcttgcttttattatctttggaggcgttaagcgtattgcaggagtggcccaattcgttgtaccttttatggcacttgggtatattattttagctcttattattattgccatgaacatttccgagttgccgggagttatcgctcttatttttaaaagtgcttttgcattagattctgcttttggaggaattgttggtttagctgtttcttggggagttaagcgaggcatctattcaaacgaagcaggacaaggtacaggacctcacgcagcagctgcagcagaagtttcacatccggcgaaacaaggtctcgtacaagctttttcggtttatattgatacactgttcgtttgttcagcaacagcgtttatgattttattcacaggcatgtacaacacggaaggaccaggcggttcatttattatttcaaatttaccgggtgtagaagcaggacctggatttacacaagctgctattgaaacagtgttgccggggttcggagctgggttcgtggcagtggctctatttttcttcgcgtttacaacgattatggcttattattacattgctgaaacaaatattgcttatctaactcgcggaaagaacggaaagtgggctatgtttgcattaaagcttgtcctgctgggagctacgttctacgggtcagttaaacaagcatcactagcttgggcgttaggtgatgcgggacttggtatcatggtatggctaaatttaattgctatcttaattttagctaagcctgcgttagttgcattaaaagactatgaagctcagaaaaaacaaggggtagaccctgtgtttgatcccgttaaactaggaattaaaaatgcagactactgggagaaagaatataagaaagatgagtcacaagtttcgtaaacaagaaaatcctcacatatgtgaggatttttttatgaagaaagcgagacagatgagttatttaagttatatcgatccttcaaacaatgaatacggtgtagttcttcaagcagatggtgaattgcaagcagttcgtaaagcattgttgtttctgttgaaaaagggtgatcccctctgttttcttcctgcttatgtgcccaaaacctttgttttaaagtcaaaacaagcgtttgatgatgcaaagagcttttatattgttcattttgtaagacgttatgaaaggaaatgaatgtatcccatattacttgatgtcttgcactttgcagctgatgagcaggcaagtaaattaaattaccaatatggtagacaagctgcctcataagagaaagtttcttatattcatagtggaattttctcatagctgtacgagtgaaatgatgaaacttccattctttctgctgatactcacaaagagtctcaattttttcaatttcagcggaaagctgctgaaattgaagctttgtttgtttatgacaagcatgtacttgggaaagttcgcttcctctttgctgtagaacgctgctcatttgttttgagagattttgaattttcctcgtaataatcggtgtataattaggaggaagaacgatgatattcacaagtgaagaagtaagcagcccaatactggtggtcgctaagcgaattaaaaacgagataaaataatggtcgtgcacaatcgtcagcatagccactcctgttagcgtagcaacgagtgttcctgcatgcaaacgcaatttagaacaggatataatagtagaaacagcaacaagcatataggtaagcggcgtcactcctaatagaaatgtgtaaagcatggcaaaagcagctccgattgctgaagcaggaaagcggatgaacgcttttttaatagaatcggcagctgttggttcaatcgtaacaatagctgtaataacagcgagcatatatggccagccgatagactggcaaatgagtgcagtcaaaaaaacggcaatgcctgttttaataatacgaccgcctaaaaaattgaatttttttatgtaaatcattatacataccttctttaaaacagttagtagtttaattataaggcatattaaggtgataggaaaacacgtcttaaaaactagcttttaaaaaacgaataaatatactataatttgtttaaatatttaaaaggggagtacgactaatgaaacaattaataaatgaagcaattaataaattacaggatacattttatgatgtaagcaaatatattggacacaaccctgagcttggtcacgaagaattcaaagcgtgcaaagcattaacggatgttttaaaagaacaagggttcacagttgaaattggtacatgtgacttgccaacggcttttactgctgtttatgacagtcaaaagccaggtccgtcgattgggtttatggctgagtacgatgctttgccggatctcggacatgcatgcggacataacttaattggaaccatgtcgattgcagctggtattggtcttagtaaagcagttgcagaaacaggcggtaaagtatacgtatatggaacgcctgcagaggaaacacgaggcggcaaggtaacgatggctgaacaaggcatttttaatcatttagacgtagctatgatggtacatccttattactgtcaccaaaaaagcggacgttctcttgcgatggatgccattcagtttgagttcttcggaaaatccgcgcacgcagctgctgctcctcatgaaggaatcaacgcgttagacggcgtattacaaacgttcaacagcattaatgcgcttcgtcagcatgtgaagccggatgtacgtattcacggagtgattacagagggaggcaaggcggccaacgttgtaccggattatgcagtagcacaattttatgtccgcgcttcaactcgtgcatatgtagatgaagtgacagagaaggtgaaggcatgtgcaaacggcgctgctctagccacgggaacaaaattaaaaatctcaaactatgagttttcgtatgatgatatgcaaacgaatcaaacattatccgatgtctatacaaataatctcatctcattaggcgtgagcgaacaaagcattacagaagaccaaggcgatcatggatctttagatatgggaaatgtaagtcaggttgttccagctattcatccgtatattcaaatttgtgatgattattttgtttgtcatacgcacgaatttagagaagcagctttaagtgagcaaggaagagaagcaatgatactcggggcacaaacaatggcattaacagggtatgacgtattaacaaatcaaacgctgctccaaaaaatcaaagaagaatttaatgctacaaagtcaaagtaagaggtaatgataaaaccataccaaataatacgcttgcgactgcaagcgtattatttagtatgagaagtgggactgaatggttcggaaaatttgaccgtggcgctgttcatcgctcgcggctcgaacaatgcggctttgaattcgagcatttgtgatttttctagcgattgattgataaaatggaacggtttctacttcatctttaatggattcagacaccccttcttgaaaagtatttggcagttttatgtttaatgaaatttgtgggtagctgcctgataaatcataataggccttagaaaaccagtcaaagtgtttaatttcatcctgccgaatacctaatatagcttgttgaacctgattattaggagccagttctgctaagcgtgtatagtagtgaatagcggaaaactcatcgtttacagctttgtttatatctcttagaagctgttcgtctagccttgtatcatcttcccaatattcttcatgccgggagtaaaattcatacatatggatatacctcctcaccgttttgttctcttgtcgtcaccatcatcgtatgtatagacgagaaaagacgtacattaaaagaaaaaagtttaacaaaatggtaaaaagggtatgtgcagagaatagtatcaaaaaagacagaggttatcttatgattaaaattgtagctaaaaccaaagaaggagctattaaagaaatagaaatgaatgagattcgttcaagccatgactttcaatggtattgggttgatttttacaatcccaccgaggaagaaaaaaagcagcttgaacaatttaattttcatcctttagcagttgaggactgtttaaatcaaggtcagcgcgctaaatttgagttgtatgatgagcattattttttagtctattatgcccttcataaagaagagcttgagcacttagaagtatctgcgtttgtaggggataactttttagtcacttaccatatggataagctaacgagcgtggctagggtatgggagcttatcaaaaaagaccctgaggctaccgaagatggaacatgggatatcatgtatgaactcttagatcataccgttgacgaatacttccccgtgctttataaatttgaagatcacatagacgacattgaagacaatgcaaaagacgaacctatggatgaattaatgaggcagctttatgacatccgaagtgatttgtcacgaatgcgccgcattttaaaccccatgagagatttaatgtatcgtattatgtcaactaatgcgttaaaagcaaaagagcaggttcgctattttaatgacatttatgaccacttattaaatatgattgaaattatgcaagcaagcagggatttgtcaaatgacattcgagaaagctttatgtccattaactcggatcgtatgaattcaatcatgtttacgctaacgcttatgtcagctattttcttaccgttgacgtttattgctggcctctatggcatgaacttttcatatatgccggaactgacggggaaatataattattttattgtacttggcattatgattgggcttgtaggcctaatggtctttgccttttataaaatgggatggtttaaatatcgaaaaggaccgaaactataaagtagattgttaaccttcctgtataaatgttaatcaactcagtaaaaatgaaattaaataagcgaagatcttatctgactctagataagatctttttcttgtgctataaacaagaaaagcagggaagcgagggaagaatgtgaaacacggaagaatgggtctgcgaagcatcacggtgctgcttgtatgcatggtggtgattctatcgctattgttaacggatttattagttagcagttcaattggaaaaaatattcgggatcaacaggctgaaaaagctcggactattgctgcgattatttcagaatccacgaacgtgaaagaaggactagagacaaaaacacctcagtcaattcaagaattcactaaacgaattcgtaaaaaatcaagcgtcttgtttatcgttgttatggatatgaatggaattcggcaatctcacccagatcctaaaaagataggaaagaggtttgccggaggcgatgagcaaaaatcattgcacgggaaatcttatgtatctgtatcaaaaggaacgctcgataaatctctgcgcgcttttgcacctatttataatgaaaaaaatcaacaaattggcgcagtagctgtggggatttctttgaataatgtaaatgaagcaattagagatgggcatcgtcgaattgttttaggttcattaattggtttacttgtaggcattcttggtgctattttattagcgaattacataaagaaaattttatttggcttggaaccctctgaaattgctaaaattctagaagagagaagtaccatgctgcagtcggttcgtgaaggagtgatagctgttgataaagaaggtaatattacacttgctaatcgttctgcacgccgcttatttgttaaagcagggttagcaccagagccaatcggtttgtctattcaagaatatatgcccacctccaggctggacgacgttttgtctacgggggaatctcattacgatgaagagcaattcataaatggagtagccattgtggttaacagggttccgctagtagtaaacgaagagattgtaggggcactctctacgtttcgggataaaacagaagttaacatcttagcagaacagctaacaggtgttaaaatgtatgtggaagcgcttcgagcacaatcgcatgaatttatgaataaacttcatgtgattttaggaatggtacagatgaattattatgatgagctaaaaacgtatattcatcagcttgttaatcatcgtgtcgatgaatctagttcagtgactaaatctattaaagatcatgcgttggcagggttcctcatgggcaaaatgagttatgctagagaggaaagcgtagaactgacgttttccgctgatgaagttattccagaaccttcagatccacacgttactcatcatctcattaccattattggaaatttaattgataatgcaattgattcagttcgtcatcaagcctctaaaaaagtgtccgttatgcttgtgtataaaaacaataaacttacaattcaagtcacggatacaggctgcggcattccttccgatacaatgaatcagattttcaagaaaggcttttctacaaaaggcacgagcagagggtttgggctgcatttagtgaagcaaacgattgatgaactaggtggccaaatcgtcattgactcatttataaatagcggtaccacattctatattgatattccgtacgaaacaaggagagatcaagttgattaaagtattaattgttgaagatgacccaatggttgctcagtttaatcaaaagtacattgaagagatagaggggtttacagtggtcgctgttgctcattcgggtcatgaagccttggtgaaggtaaatgaatatcaagttgatttagtgctgcttgatgtctttatgcctggacaaaatggtttgaaagttttagaagagattcgaacaaaacaagaggaaatagatgtcatttttatcaccgctgcttcggatgcccaaacgattcagcaagctctacgctacggagcgattgattatttgattaagccttttacatttgaacgcttttatcaagcactttcggcttacaaacaaacatttcgtacgttaaaacagcaacctcagcttaaccaacaggaattagacgggctgctgtctaataaaaaaataaaagaagctcgggtagagccgttgcctaagggtttaacgacaggaacattagaagttatcgtagaagccattgagcatcttaaagatcatcctttttcgactgatgatgtagctgaaaaaacgggaatttcaagagtgtctattcggaaatatttaaaatttctaacagatataggtcttcttggagaaagaatgacttacggcacaataggacgacctgtgtatgcgtacttatacaatgaacaaaaccgtcacttgctgcatcactacctcgttgactttgaaaaataaagagattgacctgtcagagacgtccggtgctatcttgtcagtgtgagaatattttactgtagagtgcgggtgagttaagtggtatggttgataataacaaaggaaaaaacaagtcgtttgactgaaaaagaggtggtttcttgattgaaagcatagaacgcttgactgaattactgttatcagggaatcaagatgaagcttggaatattgtgtggaaaaaaagacagcagggtttcgatacattttatatttttcagcaattcatttcagtgtcaatggctcaaatcggtatgatgtgggaagaagatgaaatttcagtggctgatgaacatttagctactactacctgtgactatgttttgtcacgctatcaattgtgtataagacaagaagttattaaaaatgaaaaaaaaggtctgtttttgtgtatagaaaatgaacagcattttttaggtttaaaaatgatttccattctctttgaagagcacggatggcagacgaaacttttaggggcagattctccgcttttacatgcaacacacgctgttgaacagtggaaacctgatttagtaggaatctcgttcagtttaactcatcatatagaaaaagcaagcgaatatatagaaggattacaaaagacaaaacatcagccgcttattttagttggaggccgagtagtttcaaactataagtttcctcttgttcaaacaaatcaagttcgatttattgcacagttagaggagttgaaagagttttttcattatcaatcaattagggggattaaggttgtcgactattaaatattctccgcttcctgtttttattatggatgaggaaatgaatattctagcgcaatctgatgaagcagccgctttattcggagaggttcaacattttttagaaattgttgacgaagatagtcagatcaaagctagaaaacgattagggcagaagaaaaaaataaaaacagaattagtcatgcattcgcgcaaagctaaaatgtctctttatacggtgaattgcaaatgggagcaaggtaaggcgcatgtaatatgtgtagaggaagattctcaaattagaattctttcagaaaaaatccaacaacatacagcgcgtttatctgaaacagacttagaactgctgctgcaaaaagaacgattagaaaaagcaatgaaccgagttatagaactgtcgggaccgtttattcatttatcgaacaacatggtgcttatacctctgtttggtgatttatttgaggaagtcatcatgaaaaatgaacatcggctgctcagacaaatagatgaagaaacggttgatcgagttatcattgactttaatggaataggtcaaattgatgaacgaggtgttgcagccctagaacatttaatatgggaatttcagctaatgggtgtacagatttatttaacaggtgtgacacccgatcatagtcaatggcttcaccagtatcattttcaagcaaatgtaaaatctattagtaacttaggtcaggccattcatcaattttttacaacggcatgaaatggctacaaaaagtgaacacttcatataaagacaataagacaggggatcaatattgataaacaggtgattaaaatttggtgaaacacgcgcgtaaagtagctttaagaatttcaattatatatatcattattggcgctgtatggatcttgatatctgataatatatctagaacattagcgcaaggtcgttttgaagtatatattttttttcaacaatacaaaggttggctttttattttagctacggggattattttgtatgggttggtatataggagagcttataaactagtggagtcccagcaagagctcgtagtaaaagaacacgaacttcaaacgagcaatcagcactatcaatctttgtttaaacataatcccgatggcgtttttgaaatcagtaaaacgggtgaagttcttcttgctaatccagaaggtgaagcaatcgttggatactccagtgaagaattgcaaaagatgaaaccttcagctcttatcgcagctgaagagtttgatatgtgtaaagagtattttaaagaagtgctgaatggaaaaggtgctaagttcgaaatgaatgtgatcaatagaaagcgagaaagacggttgcttaggtgttctttgcttcccatcatcgttcataagcaggtagtaggtgtatttatgattgcacgcgatattactacataccgtcaagatgaagagcttatgataacctcggaaaaaatgtccgttattggacaaatggcaggtgccgtcgcacatgaaattagaaacccgcttacttctttaaaaggctttgtacaggttatgcaagcctctaaggaaacaaatgacacatatttagatattatgatgtctgaaatcgaccgcatcaacttaatctcgagtgaaatgctcattcttggaaaaaagcagcatgtatcttttgaaaagaccaatttatgcgaaattttaaaacaagttgttacgctaatggaagcgcaggcaaatttaaataatgtttctattttattgaaagaaacagccaaaaggcctatttatgtttctgctgattcaaatcagttgaaacaagttttcatcaatgtgattaaaaacggtgtagaagctattatggagaaaggtcatattacaataacagttgaagaaaaagatacacgagcattgattcactttgaagacaatggaatcggaatgagtcaagagaggattgaacaagtaggaacgccgttttattctacaaaagaagctggcactggcttagggctggccgtgtgttacaaaatcatggagcgtcatcaaggtaccatgcattttaaaagcggtaaaggaaaagggacaacggttattattgatatgccaattatagaacgaaacagccgcctctcgtagctcagagaggcggctgttttcttgaaaaagaggaagtaagcagctgaaccctttgcgtctagatccatataggacataaaacctccttcttatacaagttttcgtccataataaagaggatcatattgttttctatagaagcaatagtgtatcatagttgaagctatgtttattgatgtagaaaagttaaggtaacaaccgatttttctactgacgcattgacagggtcccttgggataagaaaggtttatttataaatagaaattaaggtcagtattaacgcacatggccactgatacatttgtttaattgaaatgaaaaaaatcgtttataatatcgagaaaagcatggaaaaggagatagatatgagtcagtttatagagactttacagccttttttacaagaggcgtggaaaaaagcagggttcaatgagcctactgttattcaaacgaaagctatttcagagattttagctaataaagatgtaataggagaatccccaacgggaacaggaaagacgctggcatatttgttgcctgtcttacatcgcattcagccgggaccatctcatattcaagctgttattttagcatcttcccatgaattggttatgcaaattcacggtgaaattcaaacttggtcgcagggaagcggtatttcaagcgctgcgtttattggcggagcaaatatgaaacggcaattagaaaaactcaaaaaacgtcccaatatcattgttggtaccccaggacgtttgaacgagctaattaaaatgaagaaattaaaaatgcacgaagtcaaaacaattgtgattgatgaagcggatcaattgtttgtacctgagcatgttcaaacggttcaacagattgtaaaaatggcgttaagtgatcgtcaaatcctagtcttctcagctactgtatcagaacgtaccaaatcgctagcgaaagatatgatgaaccaccctcttgaaatagaggtaggaagagatgaacttccggcttcaaaggtagagcatgtatacatcaaaagtgaagctagagataaagtggacgtgcttagaaaactagttcgtcaagaacaaatgaaagctttagccttttttaaaggaattgatactctaatcgagtttgaagaaaaattaacatttaagcgtgtagaagcagggtctttacacagtgaaacgaaaaaagaagatcgtgctacgacgattaaagggtttcgaaaaggagatttccctgtcctattagcaacggatgtcgcagctagaggattagacattaaggggttgacgcatgtaattcacatcgatgttcctcaagatgcagatcaatacgtccatcgctcaggtagaacaggcagatcgggagcagaaggtacagtcatttctcttgtgactgaacgtgaagagcgaaatttaaaacaaatcgcacgtgaacttcaactttcattagtgaaaaaagagctttatatgggtgaaatcgtggatgaaggaacaaaagagcagtcccgtacagctaaaaaaccttcaaaaaagccatttaacaagaaaaagaaacaaaaaggtcgaatgtaaactaggtattcttccttttataacagcagtgtcacaacctaaaaagcaacgtctactgctttattacagcagcctggcgttgtttattttctctattttacctgtataaataagtaaaaaaagagaaatgtagatattttttcctaggtatgaaaatagtttgaatgatggattttgttttttgtaaccttattttaacattactttaagagacttctaataaaagaggaagaaggacgtggggacattttatggatgcaattgatgatctctttgacgacatagagcgaagaagaaaaagtaaagaatatagtcgagatgcagatcaattagaatcatatttacatgaagttcaacgtatcatggaatttcttgaagagggtatctatctgtttcaaaattcgcaccaacaatatgcgtcagattggtcagggcgttctaagagctcatatgaggatatttataatgatattacgcaatctacttttcatctgtacgacgtaagggatgaattgtttcaaactttacgcttagaaatttcacgattaagagagttagcatcggcgtaataaataacattatcgactcactcctttagaaagtgagtctttccgtataggcttaaaaaatgtttggatgatgactgaaggcttacaagagatagggggacggacatacatggagataaaagtaaatccagaggtgctgcggacatttgcagagcgaattcagcactctcattcacagacggctgatgcacttcaaaaactaagctgggaagctacaaatctacatttcttgtctgttgcagatattgataaagtgctggacttgcaggaagagttacagcatatgattcgcaaacttgattcgctaacggaaaacgcacatttattagtaaaagacactgcagaacaaatgagaaaagcagatggagagctagaaggctcttcaggctggacggagttttggtcgagcgtgtggagcaatgggggcacacattcacaagatacgtggaatgacataaagaacttaaaagaatggaatacgtatgacaatatgcatagaacgattgaaaaacctttaggtactcttaatgttatgtggaattcgctttctatgtcttgggaagaaaaagtagtgaatggttctacatgcagtcgaaccgaattttttacttatggcgttattcaaatggggttgggcattttaagtcaggaaatgaatccttcaaacattatgtttagtgacagcacagaggaagtgaagagagaatgaatgaagtatatgatggcgctggaagtgaaatggtacagttccttacagggttgtctcggcaatgaaatatacatttaacttattagaaaaatcattaattgaagcaatgaaagataataagaagattgctcaattttataagactttaatgaatagcaatttatggctagttgttagttcagagcatggagcatcagatatattaattgcagagcactacgttcagacgatgaaaagcgcagcgtaccgatatttacctgttttttcgtcaaaatatccgattgaacagatgctgaaagatgaaaagaccgtatgcgtatcatttaaggatatgctgcctgtattaaatgaagaaatagcgatattacttaaccctgacacgcctctctcaaaattattcatccccgaagaaataaggatgttaaaagaagatcaaaattattttaagcagtagccaaaaaataaaaagcgcatgtgcttttcccaagcatgtctgaatcttaaataaatagaagatatataaaggggcagggccttaaataggctgctgcttttttattactagtaaatagttctatagataatgaacaaaaatgtaatttaatagacttatagtttttattttcctttaaataggtacctatagatcatatggaaaagatttaaatgagaataaaatcttggttgtttaggttttatttgcattttttaggggtatttgtagatacatattctcatttttggaggcttttgcaagtaacctttgaccttatcattagagtttcttacaataatagtaaatatataaaccgaaggagagatatgtatgtcaggaattattcgcgtaacaccagcagagcttcgcgacatggcaggtcgttatactaacgaaagcggtcaagttcaagaattagtaagtcgtcttgatacaatgaaaaatcaacttcaagacatgtgggaaggtgcttcaagcgaagcgtttgctgctcaatacgaagaattaaagccttctttcgttgaaatgtctaacctacttacaaagattgctaagcaattagatgactctgcaaacgttcttgaagatacagataaccaaatcgctagccaaatccgcggttaacttcatctaataatctaagtgaagtaataaaaggagcgccctattctcaaaagatgaaggcgctttttctatgttttgaggtgatgaaaccctatgtatatagaagtaacagtagacttaaagcactatacaggtgatcggttcgatttgcgactatcaaactatcattcactcaaaaaagtagtcgagatcgtttggcaagctaaaaagattactcaatcaccaaaggacggtgcgtggatacgtgtttcaaataaaaatcttattttctcgggaaatgagacgatgattaactgcggaattaccacaggtgattgtatcgaaattctctaaaggagtctattagaatgtcagagaagaaaccgacttacttagaagaacagctcgaagctgtaatgacacgtcataataatgaatatacatttgtttttcaaaaagaaaaaattcgacttaatcgttctgttgaaattgaaatgttaaaggatgtaaacacggcttttcaaaaagaaatcatgatgagcgataatgaacttaaaataacaattaagcctacctctgaatttcaaccttttacagcattaagaggaaaagaagaacagcaaaagtggctgtttgcagatcagcttatcaaacaggtaaagcagcattctttttcaaggctgcatttgttgatttgtccagaaaatatcatttttgataaaagtttaagtccggcttttttacattatggagtcaaagaaagtttacctccttatgagtctaacggggaacaaagttttcaagagttaaaggctacgatagcagcggccgttgactcatcgcatacatttgaacagtattttaagttatatgagaccttgcaattaaaagaagacgctaaaaaaataatgcatatcagcaatgaggaagagttgagtcaatttgttcagcataagctaactcaaattgaaaagcatcaaaagacactggttcaacttcctcaaaaacgctggaccatttttaagttttcatctgtaggtatacttgtcttattaattccagctcttatttatactttttactcttacttttttgctcagccgaaacaagaagcatttgtagaaagcaacgaatactttcttgaaaaaaactacagcaaagtagtcgacacacttgaagattacgacattgaaagcatgcctaaaattgtgcaatacgaaatagcaacttcctatcttgttaatgaaaagttaggggaggagcaaaaagcaaatgctttaaagactattacgcttcagtcagatcctcagtattttgcctattggttttacattggccgaggagacaacaaaaaagcgctagaagtcagcaggttgttagaagaacgttcgttaattatctatgcactaatgaaatacgaaggtcagctaaagacagacaacgatttagcggctgataaaaagcaagaggagcttgataaagtagcgaacgaacttgaagaatttaagaaagaaaatgatcagcaagaagctgaagcagccaagcagcaagaagagaaacaagctgaggaggcacaggcggccaaacagcaggaagaagaacagaaagctgcagaagccgagaaaaagaaacaagaagagcagaaaaaacagcaggaagatcaatcgaagtagggaggtagttgtatgaatatgctttgggtagttagtgggcaaacgtatcagcagctgcctgtagattttaaaacctttcgccaagcaacggtaggaaacactcagcatcaaacttttacgttttcctatccgtttgagaaaggacaaatgactctgtcatctgaaaagaacggccggctcttgatttcctacggagaaaaaaggatagcagagctatctgtttctgagtcgtttgtatggcgagaacaaggacatgctttaacctttgtccttacagacacggctgttaaagaagctgtctattatattgattacggatcagaagtctcgttttccacaagtgatgaaacagctgatgtgtatcagcagaaagaaaagtgtgtagtagagccaaaagaaggattttacctatcaaagataaacgggaagtggaaggtcttttataaccaagaaccgctttatcttaacggacaccgactagaagagaatacgaaccttcagcccggagatcttattttatggtcttctatgacgattcaattgatcgaaaaagatttgctgaagattcaaagctgctatgattatgcatctaagcttccaactacggcacagcctatttctgaaatgaaaaagaagtaccccgtttatagacggacaccgcgcatgatatatgatttgcctaatgataaggtgagcttgtcctttccgtctcaagacaatgatgaaaataaccgaagcttgtggcttaccattttaccgccattagtcatgcttttagtcatgggtacggtctcgattattcagcctaggggaatttttattattatatctgtcatgatgtttacgaccacgctgattgtatctaccgttcaatacttcaaagataaaaaacagcgcaagaagcggcaggagcgtcgtcgtcgaatttataccaagtatttagagaataagcgcgaggaattacaagaactagtatcagttcaacgagatgtattatcttatcattttccgacgtttgaacgaatgaaatatttaacagaacagatttctgatcgaatttgggaacgaactgtagaaagcagtgattttttacaggtgcgccttggaacaggaacagttccgggaagctaccaaatttctttgaatagcggagatatggctaatcgagaaattgatgatttgcttgagcagtctcagcacatggaaaaggtctatcgagaagtgaaaaatgcccctgttaccgctcatttaggtttaggctctatcggtctggtaggaaagatgaaaacggtgaagaatgaactgcatcagcttgtaggacagctggcattttcccacagttatcatgacgtaagattcgtattcatttttgatgaagaagaatataaagagtgggaatggatgaaatggcttcctcattttcagcttccgcattcttttgcgaaaggtttcatctataatgaacaaacgagagatcagcttttatcttctatttatgaaatgctgagagaacgcgatttagatgaagcaaaaggagaaggggttttcttgcctcactttgtttttattattacgaatcagcagttaattgcagatcacgttatcttagagtatttagaaggatatcaccctcaccttgggttttctgcgatatttgcggcagagacaaaggaaagcttaacggagcatgttcatacactcgtccgttatattaacgaatccgagggggatatattaattcaaaagcaaaaagctgtgaatattccatttcagcttgataaacacacgcttgattataatgaaagatttgcaaggatgctgcggacattggatcaccaagttggtatgaccaactcaattccaaatagcgtttcattcttagaattatttaaagcaagagaaattggtgagttggatatcgtgcaaaggtggcaaagcaatgaatcagctaagtcgctagcagttcccattggtttaaaaggaaaagaagatattgttgaactaaatcttcatgaaaaagctcacggccctcatggattacttgcaggtacgacggggtcagggaaaagtgaattcttacaaacgtacattctttctctagcggtgaatttccacccccatgaagtcgcgtttttattgattgactataagggcggaggaatggctcagccgtttaaaaatatgcctcatctgcttggaactattacaaacattgaaggaagtaagaattttagtacaagagccctagcttctattaaaagtgaattaaagcgacgccagcgcttgtttgatagatatgaagtcaatcacattaatgattatacagatttatataagcaaggtatggcagaagaacctctgcctcatttattcttaatctcggatgaatttgccgagttaaaaagtgaagaaccagagttcattcgggaattagtcagcgcggcgcgcattggacgtagtctgggcgttcatttaattttagcgacgcaaaagccaggcggtgttattgacgatcaaatttggagtaatgcgcgctttaaagtagctttaaaagtccaagatgccgctgacagtaaagaaatcttaaaaaatgcggacgctgcttctattacggtgacgggtcgaggctatctgcaggttggaaataatgaagtgtatgaactgtttcagtcagcttggagcggcgcgccgtacatggaagatacgtatggggcggaagatgaagtcgccattgtcacagatctcgggttgattcctttatctgatgtatctactcagcagacttcatctaaacaagcggaagcagaaattgatgttgtggtgcaaaaaattgaaaaaacgcagcaggaactagctatcaaaaaattaaatagtccatggctgccgcctcttaaagagagattgcttcgcagtgagtacacagagaagcgagacggcgtattcccaattggcttgattgatgaaccggaaaagcaaagtcaaacggtatacaactatcagctgatggacgatggaaacattggtatatttggttcgtcaggatacggtaaatcgtttacagtcatgatgttgcttcttaatctagctgaaagaaagagcccggagcagcttcattattacatttttgactttggaaacggcacgctgctgccgcttcgtcagctgcctcatacggcggattatttcttaatggatcaaatgcgtaaaattgaaaaattcatgacgattatcaaacaagaaatcgcaaggcgaaagcagttatttcaacagcgggaagttagcaatatcaaaatgtataatgctctaagttcagaagagcttcctctaatttttatcacgattgataattttgatcttgtcaaagaagaaatgcaagatctagaaatgcagttcacacagctcgtgcgtgacggtcagtctttaggaatttatatgatctttaccgcgacgcgcgtgaattctattcgtcagtcgcttatgaataacttgaaaacgaaagttgttcattatttaatggatcattcagaagcgtattctattttaggacgtacgccgtatgcgctagagtctattccaggccgggctattattaaaacggatcaaccttattttgcgcagctgtttttacctgcggaaggaaaagatgattttgaaatctttgatgcagttaagctgcatattcaacgattaaagaatcaatatgctgatgctattgttccggagcctgtaccaatgctgtcatcgaaacttgtacttgtcgagtttatgacggacagaagggttattagggaaaaaggagtcattcctcttggattagatgaagagtttgttcgaccggtgcatatgaactttacgaaaaataagcattgcatcgtcatggggcagacgcaaaaaggaaagacaaatgtagtgaaggtcatactgcaaacagcgcttgaacaaggcgtgaagcaaatcggactatttgattcggttgaccgcggtttatcaagctatgcagctgaagagcaagttgtgtacatggaaacaaaagaacagattatcgactggcttgatttaactgaagaacgattgcagcgacgtgaaattaagtatttggaagcagtgcaggaaggaacggtacacagtctttcatttgccccgatcatgcttgtagtagacggatttgtacgattccagcaaaacttagatagcgtcctgcaggatcgtattacaaaattgatgaaaaattatagtcacctgggctttaacttgattgttgcagggaacaacaatgagttttcaaaaggatttgacgcgttaacaacagaagtgaagcaaattagccaagctgtgttgctgatgaagaaaacagagcaaagcttatttacacttccttatgaccgaaaagaagccgacattaaccctggcttcggttattatattaaaagtggaaaagaaacaagaattcaaatcccgctatgtgtaagtgaaaggaagatcttaacatgaccgaacagcgtaagtatacacttaaagtcatattagctgttgttttaattttggctcttccttctttctttttccagtatattggagacaacccgctgcaagtcacagaaaactcaacaagaacgattgcggtggttaacgaagataatggagtaaaagaaaatagtgaaaaagcgatagagtttggagaaaaagtgactcctcttttacaggaggggtcggattatcaatggaccgtgcttggacgaagcgcagctacaagcggtttacagaatggaaaatatgatgcggttatctatattccctcgaccttctcacaaaatattttatcgtatcaggaaaaaaagccagaaaaagctactttggaatacaaagttcaaagtcagcttaacgcagttaataaggaaaaagtagtaggggaattagaagatgctactacaaaggttaataatgaaatgtcctctttgtactggagttatgtatcacaggaagtggataaggtacgcggacagttcgataaaattctaaataaagaaatagcctttcaaaaaacaatggtcgctttttataaaccgaattcaaaagatttagcaggtgaattaaatgatcaaaagaaaattcttcagcaaatccaagataatgtaaataaagcggaaaaaggttcgagtgacagacaaggcgacgtagaacaggttgaaaagaatttaaacagctttattgaatatgtaaatcaatatcaaacatatcaagaaacacagaaacaaatgcttgaaaaaacgcaggctcaaagcgtcactgcgattcaagaagggctgtcttcccttgaatctaatcagccaagctctaagcaaagttttaatgagcaggccaatcaagtgtttagtggcttatcttccattcaacagcagttggatcaaaatcaaaaagccgtcggagaacttggagaccaacaagcggataacgtcagtgaacaagaaaaagctctgcaagatttgaacggccaaatagtcagttcatataaacagcagtctgagcaaacaaccctaaatcaaattgaaagtaagctaaagccgcttcgtgcgcagctagaggcagcttcatcaaatgagggtggcggaggctcaacggatccaggagaagacggcgaagctcagccagatccgaatcaaggtggagagacgccaacggaccctggggaaggtgacggaactcagccagatccgaatcaaggtggagagacgccaacggatcctggagaagatgatggaactcagccagattccggtcaaggtgaaggaacgtcggaaccaattaaagtggatttatctcagcaaacagcaaagcttgatgatatatcaaaagggcttgaagacttagaacagcagctccaaggaatggtgaacgaaacacctgaagcgcctgaagtacctgagacatctgagggaacggaaacgcctgaaacgcctgaaacaccggacacatccgatgcatcaggtacatccaatgctgtgaaaagtgcgcttgaaaaagtggctaatctgaaaacacaggtacaagcagtcaaagatgaactgcaaaatgtaacagttcagccggaagcttcaggagaaaatacggatgagctgaagcagaaaattgccagtttggaagcagacgttaagtctttgacagcacagaaaaacaaagcagagaaagacttagaagaagcgaccaagtcgtcgagcagtcaaattgctaagcttcaagaagaaaatgaacgattaaaaaaagagaatgaaaagttgaaagaagacggcaaaaagccttctaaaggtagtgtgaatgtagacaatctcattacgatgattacaaacaaagaagataaaattttatcttctccaaacctttcagcttctcgcaaggaaaagttgagcaatacattctcaggtaagattcaaagcagcagtgcagaagatctgctaaagtactacggtgatttatcgcagtatgatttgactttagctcaggtaggaaatacagacatacagaacagcgtccttaacaatgactctattaaaggaagtttgcagcaggcgttagctggcaccgtctcttctcaagatgcacgtaagcaaatccaacaaaacctgtctctaacaaaagaagagttagcacagttccaaagttcagtgcaagattttgctgatcaatatggacaaacagttgatgctgaacaagcatctattatggaagagctatcagctattcaagaaaaagcaaatgcaatgaatcaagagcttcaatctagcgcaggtgaagatcaagcattagaaaagaaagaagctccggacgtaacgggcttaatgacgttgcagcaaagtatgggtcaagagttgaagggaatgaacgaactcatttcatctttaggtgaaagacaagcaaatgttgtcacatacacagatgaattgcagaagcgtgtaaatgaagtccaggataaagctgacacgcttaacagcaagtgggcccaaaacgtggattcaacgaagttggttcgcggccaggtataccgtttgttaaataatacattaatagatggacagaataatgattacgtttatcattatttagctaatcctcttcaagtaagcggtgaagtgccggctgaaaaagtaaaagaggttccaccagttgtcattttggttattatcttaatcagcagcttactaattggctatttcagtcaatactaccgacatgcacctatgcttgtgaaaggtacgctgtttgggttattgaatttgattgtagggttaatggtaagtatctttagccttaatatttattcgttatcgggagaccgggcaatggaatggtcaatctttacgatcgtcttattgcttgctacatctacactcgtacgtattgctttcttattaggaagcttcgctggatgggtgacgacagtagggttgattttattttatattaccccgcttcttaacttatctatgccaaactttaattacgaagatccagtatctaaagtatatatgtcaattcaatatgatacgcagtctctgtttggacaggcgcttattgtattactgggaatgactgccgttttaagtgttctgccatctattattcgtgctttaaagacgactaaagaggttgaaaatgatgaaacctatagtgcttaataagaagattggaagtattgttcttattttttcacttctttatttccctatagcagcagcggctgaagctgatgacggaaacgttgaagagattaaaccaaatgtatataaggatgatccgattaacttggaccccgaatctttgctagaaaataaaaaagaagtaggaaatattccggaggaaataaaggatcttacatttgaaaaagaggaagatgtagagaaagagagcttaaaagaaagtctttttgcgaacgcatcagctgaagataatacgatttctgcgaaagcaaaagaatataacttgttttcttctaaaaacacttcctacaagaaagatcgaacagaacaaactgcttctgaaaagtcatcagacctacaatggttttatttattattgattggtgtgggggttgttgtattatttgcggttttaataccgcgcattagccctcagccttctgtgaaaaaatgaaaaaacctcgctgttaatcaacagcgaggtttttgcgtatagacgcaagcttataggcggcggaagccttcttcaaacaaataatcttctgcttcttcgtaagatagaaatgctgcctctaaattcaagccagaataaacattccacagatcatcttcatgaacaagtaaaagcgttgcattgtctgggccgttccagcgctgttcatttccattccctacaatagcttcttctctagctgtatcaggaagggttgacaaagattcaatagaagcttcaataattgagcgaagctcttcttctgtataatcacggatatttacaagacctttgtcatttgtttcatatccttttaaaaaccctccatatacaaatccatttccgttaggatgcagatgatgcacaacaaccgttttatcgtacacgctttcttcataatgaaaattcacgcgtcctaaagatacatcttttcgatgcagctctggaaacgatgaaataatagctaatttttcgtcaaaactaagcatacacaatcctcatttctatttaaatcatttcattttctgaaatggtataagctcttttacgattcggttgattataccatatataaagaaagacacataatgctttttccaatgtggacttttaaaaatataacccttcgcataaagtggccgtcactgtaaagaagaatacatctttttcactataaaacttaacaaaaaagaggcagggaattcacagtgaaaaaataatataaagaggtagaagaaaactagttttcaaacctatcatataggaggaataaaaaagtgaaattatacgctctgtgtaaaaaaacatgggcaatatccctgcttgtttttgttcttttagtgagcttaactcctgttagtcaagcagccgcatttttatctgttgcacaagctcttgagaatcaaaacaatagtgtacaaacggtcaaaggatatgtagtaggtcaacctacaggcacatctacagttattacgaacaattacccaaacgattatgcacttgctcttgctgacagctcaaatgaaaccaatacagacaagatggtgtacgttcaaattccttcaaatttgcgaagtacatttggacttcaaagtcactcggagttaagagggaaaagtcttactgttacgggcacactcactccttatttttcacacccaggaataaaatcagttacttctatcagtacagaaacaggaggaactgatccggctccagatcccacagagccaaccgttccagtagaagactactatcgtactgcagctgaaaaaacaggaaacagcttaaagacagagcttcataacattattgatcatcacacagaactgtcgtattcagccgtatgggaagctttaaagaaaacggatgaagatccagctaacgcaaataacgttattttgctctacacagggcgttcacaggctaagagtacaaatggaggcggagtggacgattggaaccgtgagcacgtctgggcaaagtctcacggggattttggaacagctatgggacctggaacagatcttcatcacttacgtccaaccgatgtatctgtaaacagtacgagaggaaacttagattttgataacggagggacggaacatagcgaagcactcggaaattattttgacagtgattcatgggaacctcgagatgaagtaaaaggcgacgtggctcgtatgttgttttatatggccgtgcgctatgaaggcgatgtaagtgatgagcctgacttagaacttaacaacacagtgaataatggcactgctccttatcacgggaaattatctgtgcttcttcaatggaatgcccaagacccagtagatgatcgagaacgacgtagaaatgacattatttattcagactatcagcataaccgcaatccttttattgaccatcctgaatgggtgaatgagatttggaactaatgaagaaggcgtcctggcggggcgtctttttttataaaagaaaaaggaaaaaactaaaatccgccgaatacctataggtgattttgaaaaaatggagggaagatatgaaacagctatgtaaaaaagggttggctttcgttttgatgtttatttttgttaacgctttcattttgagtccaattaacggagcggctgccgtagatggaaaatcaatgaatccaggttacaaaacctatttaatggcgcctttaaaaaaggtaacagactatacaacatgggaagcgtttgagaacgatttacgcaaagcgaaacaaaatggattttatgcagtgacagtagacttctggtggggagatatggagaaaaacggcgatcagcagttcgatttttcctatgcgcagcgctttgctcaagcagctcgtaatgcaggtataaagatcgttcctattatttctactcatcagtgtggaggcaatgtaggagatgattgtaacgttccgcttccatcttgggtatggaacttaaaaagtgatgacagcctttactttgaatctgaaacaggtacgacaaataaagaaacgctaagcccgcttgcaacggacgttatttctaagcaatacggagagctctacactgcatttgcgcaagcgttagcaccttataaagacgtgattgctaaaatctatttatcaggaggccctgcaggtgaaattcgttatccgtcttatacagcagcagacggaaccggctatccgtctagagggaaatttcaagtgtatacgaacttcgccaaaagcaagtttcaatcatatgctttgactaaatacggttcactcgccggcattaatcaagcatggggaaccaatttaacgtctgcatcgcaaattttaccaccatcagatggctatcagttcttaaaagatggttattcaacagcttatggaaaagatttcttagcatggtatcaaggagctttggaagatcatacaaaacgtattggacagttagctcatcaggcttttgattccacctttaacgtaccaatcggtgcaaaagtggcaggaattcattggcagtataacaatcccacgattcctcatgctgcagaaaaacctgctggatataatgattacaacgcgcttttagatgcgtttaaaatagctaaattagatataacgtttacgtgcttagaaatgacggacagcggaaattatccggaatattctatgccaaagacgcttgtacgccaggtagcaggtattgcgaatgcaaaaggagttgttttaaacggggaaaatgctttaactataggcagtgaagatcaatataaaaaagcagctgaaatggcctttaactataattttgcaggatttactttgcttcgtttctacgatgttattaacaatgatacgctgatggggcaatttaaaaatacgttgggcgttacaccacttgcgcaaacggttgtagtaaaaaatgcgccaactgcattaggagaaacggtttatattgttggagacagagctgagctaggtcagtgggatacgtccatttatccaattaaattaacatataattcatctacagctgattggagaggcaccgtccattttcctgcgagtcaaaatgttcaatttaaagcaattgtgaagagagctgatggatcgttaaaagcatggcagccttcgcagcaatattggagcgtgccgtcaacaacaacgacttatacagataattggtaaaacaaagccgcatagcaaacgctatgcggctttgttttgaacacaagaattatttccagttcgtttcaataaattcatctcgaccagacttagcgcggtcttctttataatgctttggatttttcttgtgaaaatcttggtgatactcttcggcttcataaaacgtagaggcaggaagaatgcttgttacgattggttttttaaaacgtccgctttctgcgacctctagcttcgtctcttcagctgcttgtttttggctgtcgttatggtaaaaaattgctgttcgatattgcgagccgcgatcttgaaattgacctccgttatctgttggatcaatttgcggccaataaagatctaataaacgtttatacggaaacacttcggggtcaaatgtgatttgaaccacttcgtagtaaccgcttgttccagattttacttgctcataagtagggttatccacagttccccccatatatcctgatacaatgccgtgaataccttctagctcttcaaaaggtgtaaccatacaccagaaacatccacctgcaaatgtagctttttccatacgtaatccctcacttaatccgttgttatgaagggtattataacaaatttatattaaaacagctagaaaagggtttgtagtctgtgtaaaagctgtggataaaggtgaatatccacagcttttacacaataaactcgactgttttgaagattgaaaaatgaaggagagaataaagaaaaaatgatagaatagataagatgtatatatcgttttagaagaaattgcataacagaagtacaatctacggactggactttggggtgctgatggcatctagataaataaagttagtacgttagtaacaagaggtaagaaacagcatattcgcgctgttaaataaatatacaaagataataggagagttgaatatgttacaagataatctcatcctagagcactatggattaaacgaattaaattttgatacgatcaaaagctatcgggatcggtttgctgaagtaaaaccagctcatccttggaatgcgcttgaaacaaaggagtttttatacaaggtaggagcttggggaaaggttagagatacccataaagaaggagtcacactcgcaggcctgcttttattcagtgaagaacggattatcacagaagttttaccacaatactttttagaataccgggaaagtaaagggaacgaagaatggacagagcgctttacctctcaagacgggacgtggtcaggaaatatttttgatttttattttcatattcatgaaattgttcgtaatagcgaacctcagccgtcaatcgcttcctctttaacagaagttttgattaatatgcttattcatgcagattataatggcgagggcggcgttattttagaaaagcaaccttctcattacgttttttctaatccaggtcttttgttagtacctacagattcagtttttagcaataccgttagtcagcttcgaaatccaaatatcgttaagctattcagtttactaggactatgtgaacgttcgggctctggtttgaaaaaagtaaagcaaaattggagcctgcatcattataaaacgccagctattgatcaagatgtttctatgcatcgtacagtggtcacgttatctttgtccactcaagaaagacaggtaagttcttctgaaaaagacacttatcatacgtctgcaactgattcgggaaataattttaaagatgtcgaaaaatatcaaaatacacctgaaaacaatgtcgaaattgactcctataataaaaataattactcctataataaaggattaatagaggagtttaagtcatataataacgatgttaactcctttaataaggaagataactgctataataatgagagtaacttatataataacgatgttaactcctatattaataaccacaactcctataataatgagcaagaagaggattcttctaatttggtaaatgtagagaatattgatacgaagctatgggatattgcagcgctggctcgtgaaaaaaaacggctttcgccgaatcagatggaacatattattcttgagttatgtaaagaaaaaccgctcatgcttaaagagtttgcttatttactagaaagaacgccggatggagtacgtaataattatttaacaaagctattacgaaaaggacaattacagttgaaatatccaaatcagccaaaccatccaaaacaggcatatttatttaataagaaagatatagagaaataaatcaagcaaccgatagaacatatagagattaagctgcaaaaaattgataaggaggagtttgctaaaagctacagatttaagggggaaattcagcataaagttgtgccaagctgtcagactctctttatatgagttctggctcgtataaaggaggaaaaagagtgtgaaaagcaagtgcgttcttatttttctggtggttatatggctgtttaatatggggaaaggaataggatgtggatcaaaggtgaatgcagagataaatataccgctgtcgacgtgggtgtgggatacaaagaaatggatgctgaaccaagaagctatcctcgaaaagcttcaagaaaaaaaggtgacaaacgtttatttacaaattgatactcatctttcaccttccgtatatcggcattttatccaacaagcacaagcccagggcataagtgtttacgcacttgacggcgctccttattggatagggccttctggtatagaagagcaggaagcattttttaattggataacagcttaccaagcacaagcagacgagccacagcaatttttaggggttcatttggatgtagagccttatttgtataaaagttgggaaaataatcgagcgaaaagtattctgcagtatcaatatgttatttctcaagccgctgtacagtctcatgagttacacttgccgcttgctgtagatataccgttttggtttgacgaagttccattcaaaaatagcaacggttccggtttgctggggcggtggattattcagtacgctgatgaagtcacaattatggcgtaccgaaaccacgcagataaagaaaacggtattgctgaaataacagaaaatgaacgcaagtggggacgtgtactatctactccgattgaaataggggtggaaacgatggcttcagatgaaggagaatacatttctttttctgctaaaggagaagaaaagatgatgcaagagctggatatgttgcttacggagtgtcaagctgaaaatcctccaagcagtatagctgttcatcattttgatagctggctacagatgaagccatgacaacgaaaagaccgctgcatcgctgcagcggcctttttgggtttagggagtatagatacaatatagccattttcttaaaggactatacataaaaaaagtaaccatttaaaaaatggctactcacacaaagggggggaacttaatcttatcattcccactttttctaaaagatatgcctcttttaacccgtttttttaaaataatttagtcgtccaagattcgcagttccacacgtctgtgacaacatcttgataaaattcaggttcgtggcaaataattaagatacttcctttgtattcttttaaagctcgttttaattcatctttcgcatctacatctaagtggtttgtaggctcatccagtacaagaatgttggtttcattgttaattagcttacatagacgaacttttgctttttctccaccgcttagaacttctactttactttcaatatgttttgttgttaagccgcatttagctaaagctgcgcgaatctcgtattgggtaaagtgagaaaactcattccatacttcttcaatacacgtattgtaattagcggttttgatttcttgttcaaaatagccaatatgctggtaatctcctttttctacagagcctgaaatcggtttgatttctcctaaaatactttttaaaagagttgttttcccgattccatttgctcctacaagggcaatcttttgacctcgctccatttttaaattcagtggcttagaaagcggctcttcgtatccaatgactaaatcagatgtttcaaaaattaatttgcttgaagtacgagcacccttaaagttaaactctggttttggacgctcctgagctagttcaattacttccattttatcgagctttttttgacgggacatggccatatttcgtgtcgacacacgggctttgtttctcgctacgaaatcttttaaatctgccatttcttgctgttgttttttatacgctgcttcaagctgctgttttttcatctcatatactttcataaaatcgtcgtagtctcctacatagcgatttaactcttggttttccatatgataaattaaattgatcacgctatttaaaaatggaagatcgtgagaaattaaaataaaggcattttcatattcttgcaagtagcgtcgcagccactcaatatgctgttcatccaagtagtttgtaggctcatcaagtaaaagaatttctggtttttcaagcagcagtttggctaataatactttcgtacgctgtccgccgcttaaatcctgtacatcgcgatctaagccgatatcttctaatcctaatccgcgtgcaatttcttcgactttcgcatcgataacataaaagtcattgtttgttaagaggtcttgaagcgtaccgacttcttctaatagtttttcgagttcttctggtgatacctccgccattttctcgtagaggccattcatttgagcttctaaatcaaataagtattgaaaagcactttttagtacatcacgaatagaaaggccgcgctctaatgctgtgtgctgatctaaatagccaacgcgcacttttttagaccattctacttttccagcatccggttctagcttgcctgtaatgatgttcataaatgttgatttaccttcgccgtttgctccaattaagccgacgtgttcaccttttaacaatcgaaatgatacatcgttaaaaatcgcacggtcaccaaaaccatggcttagattttttacgtttaatacactcatgctgacacaccttttcttttaaaatatctatcgtacgtttcgttataaacaaattgattcataacgattatagcgaacttatatacataaatccatatgagttttccagccttgaaagtcatataaaattcactcgcgtcttcctttcacttcattcatactatatatatcaatgtagaaaatccttcatgacgaagggacggttatatcgaatcattcaaataaagtatataaaagaataaaaaggcagggggaaaagaaatgaacattcatacgatactagtggcaggaagaatgcataaagagctggaggagataatcaaacaaaagcagctgcctcagacgtttcgatttatggaagagcaagacgtgacaattgaagatttaaactgggctgacgcgcttttatccttcggtccaacgaattgctttgaagaccatagctttaaatggattcattctctcggcgcaggagtcgatcggttcttagaaagcggtaattggaaaaagagtgtgatgttaacacgtacggtttgttcattcggtcagcgaatcagtgaatattgtcttagctatatgctagctgaacttcagcaccacgcacagtttcagcatcagcaaaaacaaaagcagtggaaagtgatagagcctaagcagctttctactcaaacggtcataatttacggaacaggtgaaatcggcgggcgtcttgcagccgttttaaaatcttttggtgtacgagtaatgggtgtatctaaaagtggaaatgaaaagccgtcatttgatcaagtggtctcgatttcgaaggaaaaagaattgctaaaagaagccgattggattattagtacaatgccgctaacacatgaaacaaaaagctactttgatccaaaatggatgaatgtagttgaaagtgcatactttataaatgttggacgaggagcaactgtagatgaaaatgcgttagtagaggctattgagcaaaaacgtattcgaaaagcatacatagacgtgtttgagcatgagccgttaacgaaagaatcgtcttggtgggatcattcaaacatcatcataacacctcatatttcagcggtgactacgcctgaagaagccgtcaggtgctttgttgaaacgctgcaaaaagttgagcaaggcggattgccttctaacttggttaatattgaaagaggctattaaagcattatgatgcgcgtttccgctatgagaatggtatactgaaacttgcttttcttgaacgaaaagaatgaaatctgttcttctaggggggaacaaacgttgaagcaagaagaattatttgaacaagcacgtgtatttatagagacgtgttacgctgaacttgaaaaaagcgaagcggataaaaacaagcggttaaaagaaatccatcagcaaattatgtcactcggacattatgatcatacatttgaagagttagagcacggagctcgtatggcttggagaaacagcaataaatgtatcggccgactattttggcactcgctcaatgtatttgataagcgagatgcgaacacagttgaagagataagagacgccctgtttcaccatattgaatatgcaacaaatgacgggaaaatccggcctactattacggtgtttaaaccgaaaatgaaagcaaaagagccggttagaatatggaatcatcagctaatccgctatgcggggtatgagactgaagacggtacgataggagatcctgattctgttgcgttcacggaggtttgccgaaatttggggtgggaaggtgagaaaactcacttcgatgttcttcctctagtcctgcaagtgaacgaagggtcgcctcgatgttttgatattccaaaacatttagtgaaagaagtagctattacgcatccagaacttcctgaatttgaagacttacagttaaaatggtacgctgtcccgatgatttcagatatgaagctagaaattggagggattgattacgtcgcagcaccgtttaatggatggtacatggggactgagattggggcgcgaaatttagcggatacgtatcgttataaccaacttcccaaaatagcttctatgatggaattgaacatggattacaacgcgacgctttggaaggacaaagctcttgttgaattaaacgttgcagtgctttcttcttttaaacgagaaggcgttagcattgtagaccatcacaccgctgctcagcaatttcacttgtttgaagaaagagagcaaaaaaatggccgcgaagtgactgggaactggacgtggttgattccgccggtttcgccagctaccatgcatatttttcataagccttataaaaataaagtattatcaccaaattatttttatcaagacgctgcttattaaatgaacaaaaaagagagtacgcatttgtactctcttattacacgttaattaatttttgtgtgtatcaagcaagttagcaagtacataggttttgtacttttctactttgcggccttcgtggttgcgaactcctcgtttcttaagttcctcaacataccaacctttgcttcctacgtgcatactcaaacaccctttcgtcattttttaggatgaacagaatgaggttcattgtctgctcgaatggagacatcttgtctttccaatacgtgcctcattgtaacatcttttattttatgatgaaagggaaaaaggttaaaaaaacgagaatgatttcaagtgaattttagtttactcattcctcgtttttttgagatagaaggaggaggtttaaatcatctttattttgaattagatcttctagcgtatattgatctaacaccttaatgaaggcttgcatggcttcatgtaaaacattttttaacttacagacggggctaataatgcagaagtttccttcacggtcaaaacattcaacgatatgaaaatcttcttctgtttgacgtaccacttttccaatattaatgtcttttggaagctgagctaaacgaataccgccgtttcgtcctcggatcgtttcaattaagccaagttttccaagctcgtgaatgattttcataagatggttttttgaaatattatacgcttcagcaatttcttttatattgcttagtttattattatcgcgaacgcctaaatataataaaactcgcagtgagtaatctgtatattgtgtgagcctcatctttttacctcttctcttatcagcagctgatatatctataatagcatgtctatatctaagaaatacagaaagaatgctctcatttttgacagggtgaatttgtgaacatttctttaaatatgtatataaaatatatctttttaagtagggtatgagtattataaagatgtattaaaaatatatcttttaaaaatgaatctttcggaggcgaaagttatgaaacaaacaactatttctattgtaaaaagtacagttcctgttttagaacagcatggtcaagcaattacaactcgtttttatgagatgctttttgaacagtatccttctttaaaaaatgtattcaaccaaacaaatcaaaaaacaggccgtcagcaaatggcgttagctaatacagtttatgccgctgcgcagtacatcgatcggcttgaaacgctgcttccagttgtaaagcaaatcgctcataaacaccgcagtattggcgtaaaagcagagcactatccaattgtcggagagttcttattaaaagcaattaaagatgttttaaaagaagctgcgaccgatgagattatggaagcttggaaagaagcatacggtgccattgcggacgtgttcataagtgtggagcaagaattatatgaagaagccgaagaaaaaggatggaaagattataaaaaactaatggttcataaaaaagtaatagaagcagaagacgtgtactcgttttatttagtatcacctgatcaaaaagcgctgcctgcttttctgccaggtcagtatgtcagtgtacgaattcctggtcaagagtatttatccattcgtcagtacagcttatctggctatccaaaccaaccatactataaaattacggtgaaaaaagaaaagcaaatggaagacggggtcgtgtcaacttatttacatgaccaattgaaagaaggagacttgcttgaagtcagcgttccagcaggagattttgtcttaaaagaaaatagtaaatcagtatttatcagcggaggtgtaggaattactccaatgatgtcaatgcttcatcaagcactggaaaacaatcaagaagtaacatttattcacagtgctaaaaatgagcagtttcatgcaatgaaacaagagcttcaattgttgtcagagacatataagtttgaacaacacgttttttatagtcaagcgcaaacagaccagcatgatgaacatataacgtatggtcgcttaactaaaaaagagctagctaaatatgccggcgataaacatgcatattattatgtttgtggatcttcttcatttacgcaaatggtgttagaaggcctagctgaaatgggtatttcccaagaaaatatcatgtatgaatcgtttggcccgaaaatgagtatgactccttccgcataaatgtatggaaaaagggtaaaaagctaacagtagacaatactgttagctttttttatgaaagggagtttaaagatgacaaataagcagtatgacatggtgggaataggaataggaccttttaatttaggcttagcggcccttgctgagcctattgatgaaattgatgccgtcttctttgataaagaagagaaattcgaatggcatccgggcatgttaattgacggcacggacttgcagattccgtttctagcagacttagttacatttgcggatccaacaagcccctattcttttctaaattatattcataagcaaaaacgcttgtatccgttctttttctttaatcgttttgatattccgcgtcaagaatacaacgaatacgcaaaatgggtagcagagcagctatcttcctgccacttttcttcaaaagttgtggacgtgataccgaaaaatgaagaagagtattatgaagtaaaggtagaaacacctgagggaattcaaacggtaaatgctaaacacgttgtaatgggaacaggaagcattccacttgtacctccggcttttgaagaaaagcttaatgagcatattttacacagcagcggctatttacataaaaaagaagagattcaaaaaggaaagcatgtaacgatcgttggttcagggcaaagtgctgcagagatttttcttgatttactagaagaacagactgaacatcattaccaccttacatggtttacaagatcttctaatttttttcagcttgatcaatccaagcttgctcaagagttattttcgccagactatgtagattactttcattcgctgccttttgaggaacgtacaagcacggtagaagatttaaatcctttacgtcatggaattgaatcttctaccttaacgaaaatctatgatttactttatcatcgttcacttaaaggaaaagtacccgttacgattcaagcttcgactgaagtaagtgatattcataaaaaagggaatggatatgagctggagtgcaaacaattaaaggctgaacgctcttttcaatacgaagcggatcgtttgatattgtccacgggctataagccaaaaatttcgccgttcatcgaacgaataaaagatgatatcgaatgggaagatgacaagcgttttaaagtcacaaaagattaccggcttgtctttaaacaacctcgtaaccaccacttttttacgttaaccaatattgaacattcacatggatctggtgcaacaaatcttggtttatccgttcagcgcaatcagcgtattctgaacgtgattgcagggagagacgtgtacccagttccagaagagacgacgttccagacatttaatttgttttgaatttcttctttataaaaatcttcaatgtggtttttgattattgtagaaaagttttttacccataaactatgtttaaaagaatagtgtacgggtattttatttatagaacattagtacacaaatcaattaaggagttgcttagaatgagtaagaagattgcagtattagtaacagatttatttgaagatgtggaatatacagatccagccaaagcctttgaagaagaaggccatacgctaacaaaaatcgatgttaaaacaggtgaagtaacaggtaaacaaggcgaaacaacattaacaattgataaagcaattgcggatgtaaaaccagaagattttgacgcattgtttttaccgggaggtttctcaccagatatcttacgtgcggacgatcaagtcgtagctttcacaaaatcatttatggatgaaggcaaaccggttatggctatctgtcacggaccacagctgctaattaatgctgaaacgttaaaaggacgtgacgtaactggtttcaaatcaattgctattgatttgaaaaatgcaggtgcaaacttccatgataaagaagtggtggtatgcggtaatcaactagttacaagccgtacaccagacgatatggaagcattcgtacgtgaatcagtaaatgtcttaaaataagtaaataatattagtaaaactttctgtaaaaggcgataacagggtggtttaccactctgctgtcgccttttttgtatgtaacgattttgacgaggaatttacagttatattactgcattggatgaaacggtttctaaaaggatatgaaaaccttttactatcaatagatagaagccacgtaacacaatcgaaatattttttacataaatgaaagtataattttggtagcttaaaagacgttgcgagtttcatagttttcatgcaacaatgagggtgcatcacgagattggcttgctacaagcttagatgcgttgcggttttacaaaaaaactttattatcacataggaggatttcaaacatgaagaaaaggtttcgtattgccactgtcgcaggtgccgtatcattaggattactaacagcaggacaagcaaatgcagcagctcctgattgcaacactccaaaacaaatcactattaaagatgctcaagcagcacaaaatataaatgtagatgagctattaaagaaatttaacgctcaaggacaatctgctcaagcagcagctccacaacaagaaacacaagcaccagagcaagctgaagcagctccacaggaacaagcacaagcaccagagaaaagtgaagaagcaaaagctccagagcaaacacagcaaaacacaaaagctcaacaatcagaaaatactgataaagcagaacaaacaaaagatgctagtcaattcgaacaaaaggtcgtagatttagtgaaccaagagcgtgaaaaacaaggtttaaaacctctaacacttaacaaaaaactaagtgacgttgcacgcactaaatcaaaagatatgatggacaaagggtactttgaccacaattcaccaacatatggttcaccatttgatatgatgaaacaattcggcattgaatatacaactgcaggtgaaaacattgcaaaaggtcagcaatctcctgaagatgtaatgaatgcttggatgaatagtgacggtcaccgcaaaaacattctaaaccctgatttcactgaaattggtgttggatacgtaaaaggtgatactacgtactggactcaacaatttatcggtaagtaatacaaaaagagcaggatatacctgctcttttttgcgtttttagctgtccaatttgggtatagtaaagtaagaacacgtaaaggagtgccttaaattgggacgtatattaaaaaaaattctagtcgctgtttttcctatccttttaaaagaaggatatcgtcattataaaaatcgtaaaactcgaactgcgccgtctaaaggatataaataaaaaggactcgaaagagtcctttttattttatgcttgaacggtgatatgcttaaattcttttacgttaaataatcctttgtcggttaattttagacatgggataacaggcaagcttaagaaagataatgtcagcagcgggttgaatttctgtgaaatatcaagctcatgaagagccccgtgaagctgcttaagtaagctgtttacttcattgtaagggtgaggtgacattaatcctccaatggaaagagggagggagccaatcacttcattgccttttacaataacaatacctccgccaatttcttcaattgccgcaattgcttttgctaaatcttcatcatttgttcctacggctacgatattatgtgaatcatgagcaatcgtggtagcaatcgctccgtcttttaactgaaaaccttttacaatcccaagaccaatattccctgttagatgatgacgctcaacaacagccattttcagctgatcgttttctacagaagactgaaattcgttttgcttcacttgaacttcttctacaatatgatttgtaatcaggctgtttggattaatttcaataatattagcgtgattgtgctgaagtggtatcgtaaggtttttaatggaaaaatttttgagatgaacagaattcattagttctgttggaagatcaatttgttcttcttgaacagaaagcatctctccattttcagcaataagctctccgttttgatagacatgtgctgcagatatatcggttaagtcgtctaatagaataaaatccgctttgtaaccaggagcaaccgcacctctatcttttaacccgtagcattcagcggcatttaacgaagccatttgaatcgcaattaacggatccagcccgagttcaatagcaaaacgaacattgtaatcaatagaaccttccgttaataaatcatctaggtgtttgtcatcggtacagaataaaaatctgcgcgcgttgcgttcatttacagcaggtaatagttgtttcaaatctttagcgacagaaccttggcggatcagaacatacatcccgcgctgaatacgctcaattgcttcttctgctgttacgcattcatgatctgttgaaatgtcagcggtacgataaatattaacgcccgtagcatctagccccgagccgtgcccatcaattacgccgtttacatcgttagctgcttgtaatttatcgagcatatcgtcatcgccatctcgcacagcagggaaatccatcacttctgctaatccaagcacgcgagggtgagagaaaaatggcgctaagtcagttgcttttaagacggctccagagctttcaaaaggagttgctggcacgcttgaaggtaagttcacaaatacgtctaaaggaatggaatccgagttttgaagcataaactcaatgccagatttccctgacacattcgcaatttcatgagggtccgttacgacagttgtcacgcctctaggtacaagaagttttgagaactctttaggtgtaaccattgatgattcaatgtgaacgtgtccatcaatgaatgtaggagaaatgtattttccttttgcatccacgacgttattcccatcgtattgacctattccaacaatcactccatcagcaatcgcaatatcggcttcaatgatggaaagcgtaaagacatcgataattttcccgtttttcactacaagatctgcaggtatttttttattggcaacagcaagctgtttttttaaggttgtttttgtatttgacatgaatgtgactcctctcattgtataactgaataacaatgaaggactatgtaagggagaacataaagaagaataaaaatgcagtatgaatgatgttcaaccctcgtagtccaactatttacggtagttcggtagaaactcttggaccctatttccaagactatacgagctttaggtatttcggtacattctatagacaaataataaaaacgtcaattcctaataaaaaagaaagatttttgggaatatttcatctatgtgtatgtaaacgatttaactcttatttgctcgctaaaaggcgcagcattcatgtatagaaaaaaatgtagaaaaaaccgtcaatggctattagtcattgacggagttgtcattaagcttgtttacgcagtgtacctaattcttccgcgatcgcttgcatttcacttgggctaaaagaatcttttctcattaccatatcgtataagtactttaagtcttcatacatttcttcgtcaaaagcttcagctttaattgctccgatatttagcatgcgcagtttttcactaatgctatcgaccatatgtttaatattctctggagattttactgataaatccactttgttcatccttccagttgcgttttttttattgtaacatgtttttatcgtgtgaacacttttatgtcaggttcttatccacagaagagtgaaaacgatataaataaaagaaaactattttttagtttaaaaatgattgtatataatgtttgtaataagggaaaggagtcgagactatgattaacgtattattcgtttgtttgggaaatatttgtcgttcacccatggcagaagcggtctttaaagatatggtgaagaaaaaagggctagaaggacaaattcacgtagattctgcaggcacaggaggctggcacaaaggcaatcctcctcatgaaggaacgcaatctattttaacgaaaaacaacattgattttaaagggcaaacagcaagacaagtgattcaagaggatgtagctaaattccattatattattggaatggatgtcgaaaatgtaggaaacctgagaaggatggctggacatactaaaacaggttatattgcaaggcttttggattttgtgcccgatttacatattgaagatgtgcctgatccttatttcacgggaaattttgacgaagtatatgacttagttcaagaaggatgcaaggctcttttagacgaaattatagagaagcatttttcggaataagcgatacttgaaaaataaaaaacggaggagaaacgacaaatgggtaaacgaaataagctagtagaaggtattgtcattggagcaattataggaggagctgtttctttatttgataaagaaacaagaaactccgtcattcaaggaagtaaaaaactgaaagacaaaacaacaactcttattcagcaccctgaacttgtaacggatactgtcaaagagaaatatgaaaccatccgtacgaccatcgagcaagtttctgaagatgtatcatttgtagcaggaaaagtagaaaagttaaaagaaacaacacctcaggtgatggaaattgtaaacgatacaaaagaagcatttgtggagaagtatggtgatgaacaaaaataaataaggaggcacatatggctggaatgtacataaataacatcgtaaggtttggcaaagaactgatgggccgcattcatcgagatgagctgcccagtttatcagctgaattggcttattatctgctgctctcgctatttccttttttaattttcttaattacgctgattggatttttgccattagaatcaacagacctgcttgacctggtcgaaaatgtagcgccacagcaaacgctgcacatgattgaaagcaacgtttcccatatcattggttctcataatgaaaagctattatcctttggtatcattgccacgatgtggtctgcttcaaatggaattaatgcgatcgtaagagcatttaaccgagcatatcacgtacaagaaaatcggccttttttagtggcgagaggtatggcagttctccttacttttgcgatgatatttgttattattgtagcgcttttacttcctgttttcggtcatatgataggcctttatttatcgtctacgtttgggttttcagaaacttttctcgctttatggtctgcttcccgctggattatcagcggcctcattttatttactgtttttacggggttatattactttgctcctaataaaaaactgctgattcgaaatgttgtaaaaggagcggcttttgctacgatcggatggacagtggtatcgatgctgtttgcatattacgtaaatcatttcaataactatacagctacatatggaagcttgggcggaattattatcctgcttatttggctgtacctatcggggatgattatcgttattggaggagaaattaacgctattttctacgaccgtcgagtcaaatcttcatagtcataaattgggatgaaatcattcgcaagatatgagcatactaacaaagtgaaagggaggttttacatcatgacaaagcatacaaaaaaagacggaagcaatacaaagcaaaataaaaagagccagccaaagcataaaacaagcaacagccaaaatggacaaaacggttaccattaaggcattgatttccataataaaaagcctaacaaatacgttaggcttttttgcgttaagattttagcaagcgaaggccgtttaagataactaaaatggtgcttccttcgtgacctataacaccaaatggcatatcaagcacttggaaaaaattcgaacaaattaataaaaagatgacggcaatagaaaaaataacgttttgtttcacaattgagttcattcgtctggaaagagctactgcatccgaaatttttgatagatcatttttcattaaaacgatatcggctgtttcaagtgccacatccgttccttctcccatggctactccaacgttagcagtagcaagagcaggggcatcgttaatgccatctcccaccattgaaacggtagggaatttttcttttaacgctttaattttatctactttcgcttcaggcaaacattctgcaatgtattcatcgactgcacactcttttgaaatagcttcggctgttttttcgctgtctcctgtaatcatgacggtatgaatgccctgctctttaagagatttaacagcgtctacagcttctgttcgtacaacgtcttttagcgcaagcaatcccacaataccatgctggtcttttgcgtacacaatcgtttttccttcactggcaagcgtagatgaaatcccattttcaaattcagctgcatcttctttacctacaaaatctgcttttcctattttccacgtatctccttgaagagacccaatgacaccgtatccgggaacgtcttcaagcgaatctggctgaacaagcgtcaattcctgcttatttttcacaaagtcaacaatagattgagcaagcggatgattggactgacgttcaattgatgcgattttaacaagaaattcctgttcgtttatatcagaacggacaatgacatttgttacttctggctttccttttgttaacgttcctgttttatcaaaagcaattgcgcttaaatggcttaacctttccaaatgcacgccgcctttgaacaaaattcctttttttgctccgtttgaaatagcagatagcgaagcaggggtgatagatgcaaccagagcgcaaggagacgctacaactaagagaatcattgcacggtaaaatgtctcggtccagctccatccaagcacatagtgtgggagaaatagcataactgccacaaccgatagaacaatttttacgtatgtgccttcaaatcgttcaataaacaattgagaaggcgacttttcactttgagccgtttgaacaagttgaatgatcttttgaaacagcgtctcagcacttggctttgtcattttaatggtaatggcgcctttcacattcaccgtgcccgcgaatacttcatcatcgagctgttttaatacaggaacagattcccctgtaatagcagcctgatcaatcgtcgtttgacctgagacaacaataccatcggatggcactcgttcacccggcttaactaacagcaagtcaccgatttgtaaatccgaaatggatacaatttcttcttgatctccaatcagacgcattgcttcttgcggctgtaaattcatcaaggcgctaatttctcggttgcttttattcatggtgtacgtttctaatgcaccgcttaatgcaaaaatgaaaataagcatagcaccttctgtccagtagccaattacagccgctccaatggctgcaataatcattaacatttcgacattcaattctttattttcaatcgtttcttcaatgccttcttttgctttagcaaatccgcctatcacgtaagctaatacaaagagcgtaatagatacaacagtatcctgctgttttgacagcagccagccggctaaaatcagcactccgctcaacagtgcagcaatgagttcaccatgtgtttttaatacgttgacagcagaagatgtttgaggcgtttgttcttgttttttaggtaacgcattttccatacaaatcctccttgaacgataattgagaagaataatcacaatcattacccctaaaaaaacacgaaagctgccatctcagcgatagcagcacattttttcagttcttctcttttaaattgggatatttagtatagtatagcacggaacaagcaaggaggtaacgactaacgcctaaaaaataaaaacagaatgcagctggacgtctgcattctgtaaaaaacgtactacatatctaaatgttcttcataatatttataagcggaagtgtaaatgtgctcgatatcggcatccgtcatgtacattaaggtttcacggtcaatccccttcattgtttcaataaatgtaatcatgtttttgcgttcttgtctgctcatttattattctcctctccatctgttttaatacagtttattatatttaattgtattatataacagaaaaagtattttgtgtggattttttttaaaaataggcaaaaaaatttagaaagacgtaaataattgactatatagaaaaaggtgttttataatttgtatatgaacatatgctcatatacttgcatataatgaacggagagatggtatgaaaaaagatgaacattcgtttttatcgcctcaaacagtagaagaagcgtcaagaatactaaaagctatttcagatcctacgagaatgaaaattctttatttgctatttcaagaagagtgttcagtcggtcatatggttgaagtgcttggtgtttcacaatcagctatttcacatcagttaactcacttgcgtcatttacgtttagtaaaatatcgccgtgaaggcaatacgtatttctatacgtacgatgatgaacacgtggttggaatactgcatcaagtaattcagcacgtagaatgcgcacataatgaataaaaggaggggctttgcatgagtcatgatcatcaccaccatcatggtcaccatcaccattttgatacacagcgtgaaggcaacaaaaaaggtctgttaattgcactcattatcaccgcgggtattatggttcttgagtttgttggagggctttttacaaatagtttagcgttattatccgatagcggacacatgctttctgatacaagctcacttgctcttagccttgtagcgatatggtttgctaaccgagctgcatcggctaaaaaaacgtacggttactatcgttttgaaatattagcggctctttttaacggagtggcactgtttgtaatagcaggatttatcatctatgaagcctatcagcgcgtattagagccgcagtctgtagcaagcggcagcatgatgctgattgctactgttggtttactcgctaatttaatcagcgcatggtcacttatgagacaaggcgatgtaaaaggaaatgtaaatttacgcagcgcttacttacacgtattgggagatgctttaggatctattggagctattgtagcaggacttcttatgatgatgtttggatggtatattgctgatcctattatttctgtagttgtgtctgtattaattttaaaaagcgcttggggcgtgcttgctcatagcgttcatattttgatggaaggctctcctgaaggggtagatcacagtgaaataaaaaaccttcttaaaaacattgaaggagtcaaagatgtgcatgatttacacatttggacgattacttcaggactggactcattgagctgtcatatgcgcgtagaagatgaaaaagattgtcagcaaattttgcaaaaagccatcgatttagtacatgatcactgcggcattaatcataccacgatacaaattgaaaaatcagctcttcagcatcgaacgctaaaagtttaaagaacgagcgagaacctataggttctcgctcgttttttgttgcagaggcaccttttgtccgaatacaaaaagaataataaaaataaagccaaacatcccgctaataatattaaaaaagctgatatggtgaaagaactgaataaaagtaccgcctatgtaagggccggcaaggcttccgatactaaaagcaatgccgcatagtaaattacctgtaggcagtagacgagcaggaatcaaatccgtcatatagctgattcctaaactaaacgtcgagcctacaaccatgccagctataaataaacaagctactaatggaatagcggtctcttccaagaggcttgctgtaaaaaacgtaacggctccaatggataaaatccatcctaatactaatttccgtccaaatttatcgctcagtattccgagaggaagctgaaatacaatagctccaactgcaaaggaagtcagcagcagtgaaataaactctacttgcaaaccaattcgtaagccatatacaggaaagcttccgttcagtgatgattctaaaaatccatatccaaaaggaggcaaaaaagcaatccaagcatacttagccgccttagaaaatcgcttagccgtttcttttaatgaattaacctccacttcctgtagggggaattcattttttatcaaaaataaaaacacccatgttatgaggcaaagagctgaagaaatcataaaaggaagcgcttgattaatttcaattaacggcgtcattaaagggccaacagcaaaaccaataccgaaaaaaagcccgtacaatgaaatgtttcgacctcgtttatcagcaggtgaagacgatgtaatccacgtttgagtaccaaagtgcagcgcgtgatctcctattccaataaataaacggagcacaaaccaaaaaacaacagatttccagaggggaaacaaagctaaagatacaataactaaaagtccccctgctgcgataattggtttatatccgtatctgcgaagcggcccttccatgaaaggagaaataaataaaatacctagatacaatccagttgcgtttaatccgtttatagtagaagaaagaccatctttctcaaaaataatagcaattaaaggaagcagcataccttggctgaatccagaaatggcgacaaggctaactaaaatccagaaacgttgtttatgagtagcactcatagcattcaacctctttttatctatattttgtcaatccaactgtttaatcgtacaaggaaaacgctttattgacaaggatgtagacgtgctgtgctgttaatttgacatctttttataaggaaagtagaataaaacatgtaaatagttacatgttttaatttacaagtgaaaggtgatcgctagaatacaaacagtgcttaggaaaatagcgacattcacaatcaatgtcggtacaacaagtgtcattagtcatacaggaagtgcaaaatataaacgcttacacaactgcgtttttctaggcattgctgtgagacacttagatcgcgttgtgtcagacatatacgaagtgttataaatcaaaggagcgatataaaaatgaaaaaatttattgggaatcatatgatttacacatacgaaaacggatgggaatatgaaatttatatcaaaaacgaaaatacaatcgattaccgtattcatagcggaatggtggcaggacgatgggttcgcgaccagaaagtagatattgtgaaattaacggaaggtgtatataaagtatcgtggactgaaccgactggaacagatgtatctttgaactttatgcctgatgaaaaacggatgcacggcattatcttcttcccaaaatgggtacatgaacatcctgaaattaccgtgtgctatcaaaatgaccatcttgatttaatgcatgaatcccgtgaaaaatacgaaacatatcctaaatacgttgtacccgaatttgctgacattacatttatcaaaaatgtcggagcgaacaatgagaaagttatcgctcaagcgccttatgaaggaatgacaaatgatattcgcgccggaaaattaatttaacacagagtcataaaaaagattgagacaaaagtattatagctgaaggaagatccgaacgatgaatcgagattcttgatggagaatcaaattcgttcggatctttttatggtgacggtgtaacaagtatccgtattgagagtagttggttatataaaaagcggtttataatgaagtaaaggagtgaaggaaatggaatttaacatgaaaaaagaggcgggatttacaacaaatcttccttatggagagctacatatcgccggagatgaagagtatggctttcgtccgtatcagctaatggtatcgtccattgctgtttgcagcggaggcgtgttaagaaagattctagagaaaaaaagaattgctttttctgatttacgcatccaagctggtgtgacgcggaatgatgaaaaagcggggcgaatcgaaaaaattcatttgcactatatcattacaggagaagagcttccattagacaaaattgaaaaatcaattgagctagcacgaaaaaattgttcgatgctacagtcggttattgacagtattgaagtgacagataccttcgaaattaaatgaggttgggacaaaagtattttagctgaagaagatccgaacgatgaatcaaactcgttcggattttttatggtgttattacaagcggtgcagcgctttgcacccatttgttcgtctttagatgaatggacttagctacgcctcaatctcatatttccttcggtttgctgccggctttatcaaaatagcgcatgcgttcaggagtcagctgaagaagcaaataatttgggtcatctggacttttaatccactcttttaactttttattccaaaatttcttttttaactcttcgtttgtttctacatttactttggcttctacctctacatacggatcactccaaccttgcccatcatagcctaacaaaatatgaacataagggtttttttctagttcttcgactttatgggtatctttattggtggcggtgtagagcacaagatcttcatgaaaaacatcataaagcgtgaataaggatttccatcttgaattgtagctaatgttccaattgtatagtcatccagtacggataaaatttgatttttcacatcattattgctcattttttcactccttattatatcttttcacccttggtagtttggctgatttttaactatcttaaacaaaaatcaattaagggtttatcatttataaaaataggttaaaaatactaacattgacggtgagtctatacaaattccattaatttgatatgattgattttgttgtcaaaaaatgaataaggtgggtgtacatatcgatgatcaatcggatttttcttatagcggttattcttggggtgccgctatctgttattgggcacatgatgcactggtcagatgttcttatgtttattatttactgtttaacaatcattgccctcgcagcttttatggggagagcaacagagagcttagctgttgtagctggtcctcgaataggcggtctattaaacgctacgtttggtaacgctgtagaattaattatttctatttttgctctaaaagaaggccttacagcggtggtgcttgcatcgttaacgggttctgtattaggaaatcttcttcttgtaggcggtctttcattcttcattggaggattaaaatttaagcgtcaagaatttaatgtctatgatgcaagacataattctggattattgatctttgccgttatcgttgcgtttgttattcctgaagtgtttgctagcgaaatggacgaagcgaagaccatgtccctgagtgtcggaatctccattattctcatcatcttgtacttagcggcgttattttttaagctggtaacgcaccgaggggtgtatcagcataaaagtgaagaagtggaagaacatgaggagccagaatggtcaatgtggaaagcgattactgttctctttttgtctacgttagctgtagcttacgtatccgaaagcttggttagtacaatcgaaattgtatcggaaagttttgggtggagtgagctgttcatcggggtcatcatcgtagcgattgttggaaacgcagcagaacacgcttcggctattattatggccgttaaaaaccgcatgggtgtagcggttgaaattgctgtgggatccactttacaagtagcgatgtttgtagcaccaatattagtgttagtttcgctgatgttcgaaaaccaaatgtctcttgtctttacttggcctgagttgattgcgatggtaacggccgtatttttaactattgctatttctaatgacggagatacaaactggttcgaaggtgcaactcttttaggtgcttatattattatgggaattggtttttatcttatttaaaaaagaagaggctgagacaaacatgttttagttgaaggaagaatccgaacgattcatcgttcggattctttttgtgtaagtgaatagaagaatttcccttttggtattcaggataaaacaggagatgtttgaaaaaactatggttgcattcattaacgatgttgaaaggagtttctagatgttacgtaaattgcttttatttgtgtttaccatcattatttcattttcatgttcaacgaagatcgccattgcgaaaacagctcagccgaccatcaacgtgccttcttcagctttaaatatttcaaaagaaaatacgtatccaaatgctagtcaagatacgccatatttgcagccaagtgagtttacaaaagagctcattgaaacatcaaatgtaaaaattgaaaaccctgatttaattcgtatattaaatgaatcaaacatttctaaaactccatgggcaattggttttagagcaaccgtctttttaggacagtggccattaaattacgaatcaacagaaacaaacgttaactggcaacaccagcgaatcaatacaaatcattatgataacagagcaggaaaaactcagtacaaaatgatgtacagtcaggaaaatcaaagtcatgtaaaaggcggattaacagcaaaagtgcctcagcctgagcatgttaaacaaatgatgctaattgaagcagctaaaaaaacaaagctcactttatcatttcaaacgtttgtaggtgccggaacgaaaaaagaccaggtctataacgtagctcctaaaaaagtaggttatctgtatgcgtatacgcctgctgtaagtgaaaagggaaaagtaacatatggagaagtgtatgttacagtaaaaggcagcaagcgctcaattgtggtgagaaatgtaacgtctcaaggaattggagcatggattccagtacaagattatgtttccttaagctttggagcttatgaccagccgagataacaaaaaagagattccattgtgggaatctcttttttgttattttgtaatgctcgcttggagtttgctaaaatcagtatcttgataatagctgtttttcaccaaaatattaggtcctaaacaagacactgctgaacaatgacagctaagttctttagaaatcgtgctttgctgccacatatcaaaagcgtctgtaagctttgtatcttgaatgttgccaagaggaggcgtatcaccaaaatccgttacgataatatctccgtcgaaaatatttacatttaggcgagagcgcccgtctggatcgtttcgaacggttacatttttactgctaaacaaacgctgtaaaagcgataagtcttcctcattattactgcatgcataaaacggtaacgtaccgaatagcatccacacattttcatctcgaatatcaagaaggtgatgaatagctttacgcatttcaggaagagataatgtttctagagtgctagcaaagtcacttggatacatagggtgtacttcgtgacgctgacaaagcatttcatcaacaatttgacgatgaatcttttccatgtgaggaagcgtacgtttgtttaacatcgtttcagctgatacggttacacccgcttttacaagcgcgcggctgttttcaatcatacgatcgaaatatttggcgcgctgctcataagtaggctttcgctccatcattgcaaagccagcttccacaaaatcgtccatcgttccccagttgtgagaaatatgtaaaacatctaaataaggaatgatttgttcgtaacgagcaagatctaatgttaaatttgaattaatctgtgtacggacacctcgttcatgtgcatactttaataaaggcaccacataatttttcacagaagatagagacatcatcggctctccgcccgtaatgcttaacgctcgaagagttggaatttcatcgagacgttttaaaattaaatcaagcggcagtgcgtttgggtcttttggctgcagcgtatatccaactgcacagtgctcacatcgcatattacaaagcgtcgttgtggtgaattcaacgtttgtaagcgtcggtttgccatattgtttcatatctaaatacgcttcccacggatcgaactccgcggtaattcgttgtaaagtggccataaaaaaactccttttatttttccgtaaagtgaaatgatgatgaaaacatctcacggtccgtcctgctagactaaattatacgtctcattcaaaacggacaccagtgactattatggattttattgcttttagttgtcaaatatgaaagtattcgttaggatataaggaaatacgattgaaaagctatatcaggagggtttaaaatgggaaacgccgttcgagataaagattcacaagtacgttatttaaaagatcgtttaaatatgtttgtacacgtattagactctatggagcctgaaaacacagacctagaagacattgaccgtttgatcacgatgattgatgaccttgaagcaaaatgtgagcagtttaaaaaagataaagaatgaacaaagaaaaaagcgctagaaaaactagcgcttttttgcttgaagtggaaatcctcctataaaggtctttcgaaacaatttttgaaggagtataataaattttgaaagttgtacgacagatagataaatacatacattagcgggatatgggaggaattaagtgatgattgaagctttaaaacaaagcatgtacgatttaattgttgaaacatctacaaaattgccaaaagacgttcgacgtgctatcgcaaaggcaaaagcgcgtgaaaatgcaggaacgcgtgcagcaatgtctttagcgaccattaccaataatattaagatggcggatgataatttatcgccaatttgtcaagatacaggtatgccaacatttaaaattaaaacccccgtaggagtgaatcagcttcaaattaaagaagcgatttattgggcaattgaagaagcaacaaagcacggaaagcttcgccctaactccgtagattcgttaacgggagaaaacagcggtaataatttaggcggaggcacgccggttattaagtttgaacagtgggaaaatgactatattgatgcgcgtcttattttaaaaggcggcggctgtgaaaataaaaacattcagtatagcctgccttgtgaagtagaagggttaggtcgagctggccgcgatttagacggcattcgtaaatgtgtgatgcactcagtataccaagcgcaaggtcaaggctgtagcgccggcgtcattggtgttggaatcggtggcgaccgtacaacaggctatgaattagcaaaagagcagctgttccgaaacttagatgacgaaaatccaaatgctcagctgaaagaattagaagagtatgtaatggaaaatgctaataagttaggaatcggtacgatgggttttggtggagaaacgacattacttggctgtaaagtcggcgtaatcaatcgtattcctgctagcttctatgtgtcagttgcgtataattgctgggcttaccgccgcttaggtattaaaatcaacgccgatacaggaagtgttcaagagtggctgtatcaagaaggcgaagaagtagattttaataaaaatgcaggcgccgaagagaagcaaaatgcggatgaaacaaaagaagttgtattacaagcacctattacagaagagcaaattcgtgaattaaaagttggtgacgtggtgcgcatcaacggtatgatgtatacaggacgcgacgctatccataaacatttaacagatcacgatgcaccaattgatttaaatggacaaatcatttatcactgtggtccggttatgttaaaggacgaagacgaaaaatggcacgtaaccgctgcaggaccaacaacaagtattcgtgaagaaccttaccaaggggatattatgaagaaatttggtatccgcgcggttatcggtaaaggcggtatgggtcctaaaacgcttgctgctcttcaagagcacggcggcgtgtacttaaatgctatcggcggagctgcacagtactatgctgattgtatcaagagtgtagaaggcgttgatttgatgcagtttggtattcctgaagcaatgtggcatttaaaagtagaaggctttacagctgtagtgacgatggattcacatggaaacagcttgcatgcagatgtagacaagtcttcatttgaaaagcttgagcaatttaaagagccggtatttaaataaacatacattcaaagcgtatggtaaaaagtaacgttcatgaacgagaaaattgagtggatactaagcgtaaaatgacttccgaaaggagcttcttatgcgccggttcaccttttttctcgtttttttattcgtgatgtcaacaggcatagcatctgttgaagcacaaatgtatccaaacactccgatcagctggggatttcaaaaaagtaaaaatcacaagcccgcatccgcaggtacagcttatgaacaaattcttgctaagtatgatgctttttacctcggagatacaaataaaaaaaatatttacttaacgtttgataatggttatgaaaatggttatacaccgcaggtattagacgtgctcaaaaaaagaaaggttcctgccacattctttgtaacaggacactatttaaaagaagagcctaagcttattaagcgaatggtaaaagaagggcatattgtcgggaatcattcatggcatcaccctgacttaactcaagtggatgacgcacgttttaaagaggaattgcaaaaagtaaaagatgaatacaagaatattacgggtcgtgatgaaatgaaataccttcgctcacctagaggggtatttagtgaacgaacgctagctctttcaaagcaagagggctatacgaatgtattttggtcacttgcatttgttgactggaaagtgaatgaacaaaaaggctggcgctactcatacgacaatatgatggctcaaatacatccaggtgcgatcatgcttttgcataccgtttcaaaggataacgcagatgcgttagatcaagccattgtggatttaaaaaagcagggctatacgtttaaaagcattgatgatttaatgaacgaacgcaaacaaatgaagaaaagtccttctaaaacgaaataaagataaaaaccgatgggaatgtttctcctgtcggttttttgctgttgaagtgttataatatgcgttgatgtcttttttaaagcaatacggtctaataggttttaagcagataaagaccgttaataactatataaagaatttaaactaatcggagttggtctcatgaataaaccaaaaactgaaatgaaagttcaaaaaggacaaacgtttccgttgactataaaaagactcggtattaatggagaaggcgtaggatattttaagcgccaagtcgtcttcgtgccgggagcattgccgaatgaagaagtggttgtagaagcaacaaatgttcagcaaaagtttgccgaaggaaaaattaagcgaattcgcaaaaaatctcctcaccgcgtagaagcaccctgtcctatttacgaccagtgcggaggctgtcagcttcagcacttatcctatgaaggtcagctagaatctaagcgcgatattgttctgcaagcgttcgaacgtcacagttcattaaaaaaagtagaggaaaaaacacgccaaacaattggcatggaagatccttggggctatcgtaataaatcacagttccaagtaggtgtggataaacaaaaagttatcgctggtttgtacggactgaattctcatcgactgattgacattgaaaactgtccgattcagcatggagccacaaatcacgtgacaaaagaaataaaacgaattttacaagatcttcaaattcctatctacaatgagcgcaaacgccgtggtattgtacgtaccatcgtatctcgagtaggatttgaaacgggtgaagtgcaagttgtcttgattacggccaaacaagaaattccgaaaaaagagcttgtgatcaaagaaattaagcgccgtctaccggaagtgaaatcgctcgtacaaaacgtaaacggtcaaaaaacatcgcttatctttggagacgaaacgtttacgctatctggaaaatcggtgattcaagaaacgttaggcgatatttcattcgaactttcagcgcgtgcatttttccagttgaatcctcttcaaacagtgaagctgtatgacgaggtgaaaaaagcagctgcgctaacaggcagtgaaaaaattgtagatgcttactgcggagtagggacaattggcttatggcttgctaaagatgccaaagaaattcgcggaatggatacgattgaagaatccattgtagatgcgcgaaaaaatgccaaagatcatggatttgaacacgccacatatgtgacgggtccagctgaaaagtggatgccgcagtgggtaaaagaaggctggaagccagacgttatcgttgttgacccgccgcgaacaggctgtgatgataagcttctaaaaacaattttacaagtaaagccaaagaaagtggtttacgtatcttgtaatccatccacattagccaaagatgtgcagcagctgtcgaaggcttattatgtggattacattcagcctgtggatatgttccctcatacggcgcatgtggagaatgtggtaagtttgacgttaaagaaataaatagatgaagagtaaagggcagatttgattctgctcttttttgtttgtaatagggtgatctttgtcacaagtaaagaaacaagatttttatgtagtgtcttcttttaaagaaggtaaataaatgaaaattatttttcctgttgacaaagcatccaactggtattagaataaacaactattcgacagtcattctattgattgaaaaattgaatacgtagaaagctatgattgctatggatcacactatagcaggagcagcttctggagagatcgcgatagtttcgcgacgccgaagggttcacaatctcaggcaaaaggacagaagagtaccggatatttatttggcatgttactaattggtagtatgtaccataatatttgttattcttatgaccatgagattggagcgcatccaatctctttttttattgggctttattttgtagtctgcacgatcgtatcaaaggttttattgttaggaggagttagagttggaacaacgagaattaaagagggatttatccaatcgtcatgttcagctaatcgcgattggaggaaccattgggacaggattatttttaggttctggtaaagcaatacagcttgcaggtccctctatcatctttgcttatttaattgtgggtattgcgcttttctttgtgatgagagcgctaggagaactactgctgtctaaagcaggttatcaatcgttaacagatattgctgaagagtatcttggaccgtgggcgtcgtttgtaacgggatggacgtactggttttgctggattatgacagctatggctgatgtgattgcagttggcgtatatgtgaaatattggttcaatattcctcagtggattcccgcacttatttgtgtaatcattttattaggtcttaacttattaaccgtaaaattatttggagaattagagttttggtttgctttaataaaggttattacgattcttgcattaattattattggcgttattttgctggtaatgggatttaaaacagacgcgggatccgttactgttcaaaacctttggaatcacggagggctatttccaaatggggtttcaggtttcttactttcattccaaatggttatattcgcatacgttggggttgaattggtaggggtatcggcagcagaaacatcaaaccccaaaaaaaatattccatcggccattaataaaattccgctgcgaatcttatttttctatgttggagcgcttatcgttctgttgtttattaacccgtggatggaattaaatgcagcagaaagcccatttgttaaaacctttagtttagtcggaattccgcttgctgctggaattattaattttgttgtactaacttcagccgcttctgcctgtaatagcggaatgttttcaacaagccgtatcttatataatttaagtaaaaatgaccaagggccatctaagtttgcaaaactgaacaaaaaccacgtaccaagcaacggattgtttgtatctacgctggttatctcagcgggagctcttttaagcaaacttataccagaccaagctttcggcattgtcacgaccattagcgctatttgttttatttgggtgtggagtatcattctcatttgccatctaaggtataaaaagacgcgtccgcagctgcatgcaacatcagcattcaaagcaccgttaacaccattcataaactatattgtgttagctttgtttgcggtgattcttgttattatgctgttttctgacgcgacgcgcccagccttattgttgacgcccgtttggtttattctcttatttattttttactggactagaaggaaaaagaaaataaatctttaaaggctagaaaatcagcagggaacaaacataattttttataaaagaatatagtaaatttctgacctcatcactctgtgatgaggtctttttagtggaggataaataattgatttctactgcatgaataaaatgcaggaagcaaagtttatagaagaaaactaaaaatttgttctaacagaaaacacagtgagaaagctcgtagttttctgataggaatgtagaacaaattgcttttcttctgtgtctaaagatggaattccgtcatttatatggaaaagttttcattttgcagtacaatggaggtagacttcattagattaaggtgaacaaacatgaaatggtttaaatctcatacgttttggaaaatcttcacgattaatgtgcttcttatttgtaccgtactgacgctaatgtttattgtttcaagagtgatgctgcctaatatttctcaagatcaatatcggcaggtaactgataaaaccgtcaagagaatgaaagagcaaattaacgtcgtcattaaagatatttggagcctaggcgacgaggtacagcaagatcctatttttttatcggatgatgaacaagaaatagacaaagaattgcagaaaatagttaatatttcaccgtatatcgatagcggaaccatttttaacgtaaaagggtatgttgagcattattacccgaacgatttaaagaatatgaaacatgtgaacttaagtaaaagaaaatattttcaagaagcgctgcgaaccaaaaaaatatatttaagcgatgtcgtttcagcagatacaaagcactacattgtggtgatggcgattcctattttggatgggcagcaaaatgtaaaaaaggtcgtaaatttagcgctgcgaattgaagaaaataaaagttttcaatccatctttcaaacgttcgatataggagagaacggctatacatttattgtagaccgcaatggtagaattatttcccacccagagaaacagagaatcggtgaaaatgctaagaaaaacgaaatcgttcagaaaacgatgaatcataaatcaggatatcagcgcgtggtgaacaccgaaggtaagtatttctttgcgtctttcgaatatattcctgttttagattggggaattgtcgctgaattacccgttgaagacatttacaggccttataaaatgtttgaaaaaacgctttggatcgtttcaggtgttacgattttactgctttctttttttactgcgttatatgcaaggcaaattgtgaatccaattcataaactatatgaattggcgggacaagtagcgcgcgggaattttaatcaaaaaattccggaacgagaaattgagcggggcgaaatcggtattttatctaaacagtttaatgaaatgattagctatatacgccattctaaagcgaatttacagcaaaaagaaaatcagctagaggaacaaaaaacgtttttaagacaagttattgacattaatccaagctatatttatgctatcaatcaaaaaagggaattcattctcgtcaatgaatcttttgcgatgctcttaggtgaaaaatctgatgacttaattggacaatcaattgataaatatcagttcaaccttcaatcagatcttttatataaaggagcgttttcaaactgtacccaaaaagggacggtattagaagaacagtttaaagattcaaaaggaaaccggcgctgggtcgaaacagcaaaacttcctattatgaatgaaaaacaggaagtgattcaaatgctgtgcgtatcgacagatattacggagcgtaaaaaggcagaagagaagcttagaacttctgagaagcttgccgttgtaggagaacttgcagctggagttgcccacgagatcaaaaatcctttgacgtctttaaaaggttttgttcacttattaaaagaacaaaatcccaaagatgctttgtatatagatatcatggaaactgaattagaacgaatgaatggaatcgtagaagaatttttgatgttgggaaaacctcaggttatgaatgttgaacccttgaatatgcaagcgcttgttcaagaagtgtgcttgcttcttgaacctgaagcagtagaaaaaaaggtagctttcatatttgaaagggacgaccagttaccacaggtatatggagataaaaatcagttaaaacaagtatttattaatattattaaaaactctatcgaagcaatgccggaaggaggagggattcatattactattaaagcaaaagaaaaccacctttggctgcagcttgctgatgaagggcaaggtattcctcctgaacggttaatgaagataggtgagcctttttatagtacaaaagaaaaaggtacaggtttagggctgatggtcagctaccggattattaaagctcaccgtgcgcagatgacattttctagtcagttaaatcaaggaacaagtgtggatatattgtttccaataataaaaaggtaggggaagtttcccctacctttttattattatacttataatatatcgaaagccttgatggtattaaaataaatgaaagtactaaagaagatatccacaggttaacaagaagttaactgctgaattatataggatattcacaattttatccacactattcacattttttcagaaaatttacataaaaattacccactgtcatttcaagttatgaaagcggtaatatgcatattcaataaagttatgcacattatccacataattgtgggtaaactttgtggatatagtagagtggtaaaaaaacttcaataacatctataaaatcttcgtattattatgtctacataatataaaaacgtccttccgatacaaactgtacagaaaggacgttaagatgatcaagcgttggatagagatgttttgcctcacttattttttcgtgtagccgcctgcacggtctgcttttttaaactcacggccgtaatagatttcttgagcgctacttaacgtattttttgcgttttcttttcgttttttttcagacataaaaaaacctccaattaacgtttttcgatcatgttacttattttttccagaatctctcgtttttaatcataaaaaaagctctccgttacacggagagactcttacgcttctttaagctggtgatcttcttgaacgtcttgttcgtgacgcaagtagtataatgtatacaagtcttttggaatttcgtataaatcatatacgtcttcatgttgattaatttcatcgtataaagctttgtgtgtttcatttgcaagtactgcataaggcagtttttctgcagccttaatagacctgatattgattttacgaattcgcataaaaattcgctctatatttaactcaaagaacagttcattaaagaacgcttcttttgcaatttgattatatccttttccatgaaacggtttgccaagccaagtgcctaaaaaaccagcttggtcctgtacatcaaataaattaatggtgccgatagggttaccccattcgtctaaaatcgtgcgagaaataatttctccatgatcttctgcttccatcgtttgtttagtcacaaataaaaattcttcataggaatgggctttatgacgaacaaaagggaagacatcaggatgtaccatgagttcgtatagagattgacagtcatttaggtcacgtttttttaacataacttttccctcctgatcgagggtatatacagactccaatcaagtccccaccctcgaaattttttaataattaaaaaaatttcggggtgggaatcgaacccactagaaccagttacctggtggcgcaccatttgccttcccattacaagtcaacaaacataaaaagtcaacgtgtgatgtttatgcttttgtgaaattcacatgcttctaaacgtatcatactaaaaaaaataaaaaaagaaaataggtaaaatgttaattttttttaaataatattttaccatctatcatggtgaaaaggggctttgctaagtagtgaaagggatgatggctccatagcactaaatcagcgtcttttcctacttcgatactgccgattcgctgatcaatacgaagatttcgagcagcagcaatcgtgatgccttctaatgctttttgttcttcgagcccttcacgtacggcaatggatgcacaaatatttaggtactgaatgggcgtataaggatggtctgttgtaatagaaacttctactccttcattgcagagagcttgataggttttccatgttttattcttcagttcaacctttgagcggcgtgttaaagttggtcccacgcttacttttaagtttcttccgcctagctctttagcaattaagtgaccttctgtacagtgttcaatacgaacgtctaaattaaattcatctgccaagcgcagagctgatagaatatcatcggctcggtgagcatgaattcgaacgggaatctctctattcagtgcttgaatgagtggtttgattcgcaaatcatctttattgtcactgctttttgcatgataaaaggcttctctcagcatccccataatacccattcgtgtaatggattccttgttgccatggctgtggattcgttttggattttctcctagcgcaatcttaagtccagctgtctcttgaatcaacatttgagaaatacttgttccggctgttttaataacggacgttgtacctccgatcacatttgcacttccaggcataatgtgtacagacgtaatacccgcttcaatggcatctttaaacccaggatctaaaggatgtacgctgtcaaaagctcggatatgcggagtcataggctcgattgtttcgttagcatcatttccggcccagccggttccttcatcatatagtcctagatgtgtatgaacatcaataaatccagggaataagtaacgctgtttgcagtcaatgacttctacttgaagaggaggctgcaagtttggcccaattaaaacaatttttccatcttgaatgagcacatcattattataaataggttttgacgtaataggatagagcgttgcatttttcaagagaatggttttcataaaggatgctcctatctatcggcagcttagtcacctgttttaggtaaatatcaggaaataactagagtaaatctcgcaatgcatcttctaatacagtatatgtaaaaatgtaattctgttgaatcaatttttcaggtaaaacacgctgtcctttcaaaataatcatactcatttctcccatcagcagctgaaggccaaagctaggtacgggcatccagtgagggcgatttaacactttgccaatcttctttccaaactctttcatttggacgggatttggggcagttacgttaacaggtccttctatttgtttggtatgaatacaataatcaataattttgacgacgtcttgaagatgcacccaagacatccactgctctcctgaaccaactgttcctcctgcaaataatttataaggaagggcagtagaagggagtgccccgccatctttgcctaatataacgccgaaccttgttaaaacagtacgaatattgagttccatcgcttttaacgcttcattttcccacttttttaccgtttcagctaaaaagtctgtgccgatggatggagaagcttctgtgaatgtttctgtagttgatgtcccgtaataaccaactgcgcttgcatttacataaagggacggtttttcgggtaaggcagccataatacgaaggatttcttgagtagaagaaaggcgactttccacaatggcttttttgcgctcgtccgtccagcggccgctgttaagtgaaacgccagctaaattgataaaaacgtctgctccttctacatgctcttcaggttggctgctttcttgcatccactctacatatttaagtttcggatctcttgcagctttatctgcattgcgtgttaaaatatatacataatgtttttgtgttaaaaaatgttttgttaaagctttacctacgaacccagttcctccagcaataacaattttcatacgaatttcctcctttattgagataaataaaaatgtgtatgatatgtttggcggttcttcagccatcaatttaatgagaaatatgaggtgaaggtgtatgcctgttgtcacaaaaatcacaacgcaaaagaatagcggtgaacgttataatgtgtacttagattatggtaaaggtgaagagtttggctttggtgttgacgaaaatgtcctcatcaaatatgacttgaaaaaaggtcgtgagcttgatgaatttgaattaacggaaattcagtacgcagatgatgagaaaaaagcttataatttagcgatcacttacttatcttatcgaatgcgctctgaaaaagaggtacatgattatttgaagaaaaaagaaattaactctactattattcaacaagttattcagaaattagtcagccaccgttatttaaatgatgaagagtttgcaaaagcattcgtgttaactcaaatgaacacgacatcaaaaggaccaagtgtgattcaaagagaattaaaagaaaagggaatttctgattccactattacccttagtttatgtgaataccctgaagaacagcaaattcaaactgctgtgaaattaattgaaaagttaaaaggaaaatataaaaaattatctcaagtaatgatgaaacaaaaaatggaacaagcattggcagtgaagggctattcattttctattattcaagaagcatttcagcgcacgaatacagaaaaagaaagcgatgaggcatgggaagctctgcaataccaaggaatgaaagctcatcgtcgtttttcaaagtatgaaggctgggaatatcagcaaaaaatgaagcaggctctttataggaaaggattctctattgaccaaattcaatcatttctagattctattgaagaggaataaaggcgggacaaaagtatgttagttaaagggaaatccgaacgatgaatcgagattcttgatggagaatccaactcgttcggattttttattgtgatggtaaacgtaaacttcatgtgtttagttggttctagcagtggattggagggcaagacgaagactcctgccgtccccggaaagggagaagtcctgcacggaaatcacccgctgtgtcacaagcaattcctataagatcatttatacaatgtgtttatctttagaatagattaatgcagttatgtttcactcttttttaaaacaaaatatcttctgagtcattctgctgtttataaataatctcagcaatttcggaagccgagcgcaatcggcttttatctttaatgtggttgttgtgatcccaaaaaggggtattcatgcctcccatgtaagctgcaatcacatgaaggctggtatcttggtattccacttttaaactttctgtaaatccccttacgccaaacttacttgccacatagacgctttcattagctttcccgcgaagtcctgcagttgaaatgatattcataactttaggttcaggtctcgtcaagagatgaggcataagcgcttgtgttaaaaaaatagttccttttacatttgtatcgatgacttcatcgatggcttgttttgtataatcggtcaaaggaccaaaatgtccaatgcctgcattgttgataaggatatctactgaatgctgcatcagcagtttttctacagattttcctacttcttcatactttgtaatatctacagacatcgtatatacgttgtctcctagctcatgctgcgcctcttttaatttatgttgattgcgtccagctagaatgacgttgtagtcttttgcgtaaagtttagcgagctcttttccaagacccgtcgcaccgcccgtgattagcactgttttcattcccaaaactcccttttcatagtctccctttagttataccttttgttataataaaatgaaagcaaacaagggggaaaacagcatgtctgaaaaacgttacagtgatatgacgacgtatgaacttcaacaagaaattgggtctcttcaagaaaaagcacgaaaagctgagcagcttggcatggtcaatgagtatgcagtattagaaagaaaagtaacaatggctaggtcgtatttattggatcccgaagcgtttaaagcaggggaagtatatgaaattcaaggagatccgggttcatattttaaaattgattatatgaacggagtttttgcgtggggatttaggcttggctcaccgcaaaacgaagaggcactgcctatttccatgttgaaaaaataaagggatgaacaagcagcacgaagtgtgctgcttgtttgatttctatattcactctatttttaaacgtaaagcaagcggttattcttcgcgctcattagaagcatgcatacgttcttgaggatgcgtgttaattgttccatttgcacgttttgaagcgtactcagcttttgcgcgaggttcgccttcaagcttagtatgatgttggtttgtaaaatcttttgctttattgcgcatagatacctctccttttacaacagaaagcgttgcggttatgatatagtacatgagggagtgaataactccgcatttatagtgtaagttaaaagtgcaaacatactcataaagaattttggtaatcgaggtgttcttatgaacgatatatttgaaagattaacgaatcagctcttaaataaaaacagttcgctctcatatgctcaagcacgcacgtgggtcgagcttttctgggaagattttgagtcatcttacgcaaaagcaggatatgattataaagggaaagaagcgacggaaaaggttgttacgatgtatatcaacagctacggagacaaacttcatgaaatcgcggttaaaaaccctaaatatcagcatttattaaataacgatgactatttaaaacattaaataaaaacgaaccgtcttctcaagacggttcgtttttgggtttcatatttgttcttgttatgattagtgcgggagataatcaagctttttacgcaattttttctcactgaaaatccaacctgtgtacgaacaaatgatatttaaatcgtaatcaagctggactacggctacaaatggatagtagtctttgctgcggtagcgtaaatcaataaagcgcacttcaatgtggtcgttatattcatccagttcccatctataaataggtgaaaatgaaagaaaagcagataaattttcatcttttttcgctacttcaattacggctgattcgggaattggaactttatcaaacgtatcataaataaaaatttcttctccgattgctcttcctacatgaaaatacttttcggtcgtcacagctaagtgccagtgagtgaaacgcagcgtaggagagatattgagcttgataacatcaggaaactgttttcgaagcttcttggcgatttggtggcgcatataaaagcgcaatccatagtaaaatgccaataacacatacagcgtaatgaatgttggtcctggctctgctccaataaaccagattaaaatcgcaagtacgtgagctgagaaaatcacgtaatcaaacgtgttgattacgccaagcgcaatccatttatttgtgaaaggccgtaaagcttgcgtaccataagcgttaaagatatcaacaaaaacgtgaataatgacgcctgcaaaggtccacatccatagatgcagcaagttagctcctggcagcagaagcgaaagaatgagcacaataagcaaaggccataaaataacggccgggatagaatgtgtaattccacggtgattgcggatatactgtgcattgtttcgcaactttaaaacagtgtctaaatcaggtgctaatgacccggccattacgccaatcattacagcatccagtgtggctgtattcgcagatacagtggggtctaatgttgcaaggccgcctaaagcgattcccattgcaatgtgtgtaccagtatccagagcgaactcctcctttgtaaaatgacaatcttagagtatcctaattcagcatggaagcttgattcagggcgaaaaatctcgctttattactaacgcagcaaattagctgtttttattcattatttgaacaattcattttactattcatatttgtagttgttataaggttatcataaagttactaagattcaaaaagcaacacattgtatatgtatagttaatacctcggaggctatgacgtgaaacaaagtaaagatattgtacaaaatttcgatattcgagcatttcaagatgacttaatctcttggtttgagcaggaacagcgcattctaccttggcgtcaagatcaggacccttataaagtgtgggtatctgaaattatgcttcaacaaacgagagtagatacggtcattccgtattttaataattttattagcaaatttcccactattaaagatttagcttatgcgaatgaagatgatgtgttaaaagcgtgggaaggattaggctattattcccgtgcccgtaatttacaaaccgccgttcgagaagttcacgaacaatacgggggagaagttccgaatacgccagcagaaatctctaaactaaaaggagtaggcccttatacaacaggagctattttaagtattgcatacggagtgccgcaacctgctgtagatggaaatgtcatgcgtgtgctatcgcgcattttatccgtttgggatgatattgcaaaaccgaaaacaagaaagctgtttgaagatatcgtgcatgaaattatttcaaaagataatccttcctatttcaatcaaggcatgatggaactgggcgccattgtctgtacaccaacttctccttcctgtttgttatgtccagttcgcgaacactgccgcgcgtttgaagaaggagtgcagaatgagcttcctgttaaatcaaagaaaaaagcgccgcgtgctcttcagcttgctgcagtggtgattagagacgaggacggaaattatctgattcataaacgtccaagcaaaggacttttagctaacctatgggaatttccaaatatagaagtagatcttagtatagcgccagatcatcagcagcttcaggcatttattcaaaatgagtacggagctgatattaaaattaatgcgccgtttaccacaattcagcacgtattttctcatatcgtctggaatgtcacagtatatgaagcagagctggtaagtgatatcagtgcattaaaaaacttgaaagtagtttctgaaaaagatttagaacaatatgcatttcctgtttcccatcaaaaaatcttaaaagaatatttacttgttaaataaaagaagcgtggataaactccgcgcttcttttatttaatcatatgaaacatgcgtgccgtgtgtataatctgcttcgtggcgctgtaacccgccccgtgcttcaatttctttaataatttgctgatgaatactttgtccttcagcatttaaatacggcgtcatttgctgtaaagagtgatggaaaaacgcaagctcgctgtctttccactcgcttttagaaatcattgaaagagccgtcatgtctctacctacatacattctattcacctcgttcattttatcaagttttatctattttccctatattacttgtttcttatgcgataaaatcagtacaatgtaaagataatatgatacataagggagatgacatcatgtcacaaaaggtagcactagttacaggaagcagcagaggtattggtaaagagatcgccttacgtctggctaaagaaggatacgatattgtattaaactatgcacgaagcaaaagtgcagctcaggaagtagcggaagaaatcaaagcattaggcagagaagcattagttgttaaagcaaacgtaggaaaagtagaaaaaattaaagaaatgtttgagcaaattgatgaagcattcggtcgcttagacgtatttgtaagtaatgcggcttcaggggttttacgtcctattatggaattagaagaaactcactggaattggacaatggacatcaatagtaaaggatatttattctgtgcacaagaagcggctaaacgtatggaaaaagtagggggaggaaagattgttaccatcagttcgcttgggtctattcgctatttagaaaattatacaacagtaggcgtgtcaaaagctgctgtagaagcgttgacccgctatttagcagtggagctggctccaaagaatattgtggtaaatgctgtatctggaggggctgtggatacagaagcattaaaacatttcccaaatcgcgatgagctcctagatgatgcgcgcaagcatactccagctggtcgtatggtggagccaaaagacatggtagatgcagttatgttcttagtgtccgatcaagcaaatatgatttgcggtcaaacgcttattattgacggagggcgttcacttttaatgtaaggtaaatgtgttttttgcttacaccttaaaatactgaaaaaagtttgcataccctatttacctcccgggcatattaattttcgtggaggtgattacaatggcaaaacaaacaaacaaaacagcatctggtacaagcacacaacacgtgaaacaacaaaatgctcaagcatctaaaaacaatttcggtactgaatttggtagcgaaacaaatgtacaagaagtgaaacaacaaaatgctcaagcagcggcaaacaaaagccaaaatgctcaagcatctaaaaacaacttcggtactgaatttgctagcgaaacaagtgctcaagaagtgagacaacaaaacgcacaagctgaagcaaagaaaaaccaaaactctggtaaataccaaggttaatatcaaaagcgagcttaacgtctttcatacggcgatgttaagttcgctttttcttatataaaaagcaacaaagtatgacaaaacttcttgaaactttacatagctcgtcaaaggaatctggatcacctaaacagaatgttaacagaagtgccgcgtgtatggttaaagcaaatagggaggagctatcgtatgaaaaaatttgatcagctagtgactcaacaattggagaccatggatcaacttctgtttttgcagtctgagattgagcgctgtcaggaaattgaaggtgaactagtaaaacttcatgaagaagcaaaactgcattctgtgcaagatgaaattagtgaaatgaagctaaaattaaaagagattcaattgacgtttgaagcacaaaccgaagacattattcgtacatataaaagtgaaggggcttgctctacacttgcttaatgaacattgatgggtcacttcctctcttttttaaggctgccaagcaaaggaaaaagtaggggaagtgacttttttgaactcaagaaggttagcacatttgtgttaaaatgagagagaaaccgttataataaacataagacaaatggagacgttatatgaatttttttaagtgctaaaatgaaagtaggtattggagatgggaattccggtggaaggagaaacaattcaaatacacagctacaagcataatggacatattcatcgcgtgtgggatcggacaaccgtattaaaagcaaccaataacttagtgattggaggaaatgatcgcacggtcgttacagaatcagatggacgaacatgggtcacaagagagcctgcaatttgttattttcatgctcagcagtggtttaatgtcattgggatgatccgtgaagatggaatttattattactgcaatattagttcgccgttcatttatgatgacaatgaagcgctcaaatatattgattatgatttagatatcaaagtctatccagatatgacatacacccttcttgatgaagatgaatatgagaagcatcgaaaagaaatgaattatccagaagtgattgaccgtattttacataatcacgttgaggagttaaaaggttggattcgacagcgaaaaggcccgtttgctccagatttcattgacatttggtatgagcgctttttaacatatcggcattcttgatgaatgatctagagaacattatgttaggccgtctaaagctgactgtttgatataatgttctttttggcgttatgctcaccatcttttagaagagataaaagcactaaaaaatcgacgcgtgtacatatactaagaaagcttgccctcatagatagaaaggggagattttatgggaagtataagacgctacatgaagtttgtacagccatacaaatggcaaattgtcggtactgtattaattggtattattaaatttgctattcctttattaattccgctgcttttgaaatatgtgttggacgatatcgtaaatggacatggcatgtcctcctctgaaaaagttcataaaatggtgacgattatggggatttcgtttgttgtatttttagtgttaagacctcccattgaatattacaggcagtattatgctcagtgggtatcgagcaaagtactatatgatatacgagatcagctgtttagccatattcaaaagcttagcttgcgttattatgcaaatacgcgagcgggtgaagtgatttcacgagtcattaatgatgtagagcaaacaaaaaactttgttatcacaggtttaatgaacgtatggcttgatatgatgacgattgtaatagccattgtgattatgtttacgatgaatgtacctttaacactggtatcgattattttgctgccggtttatgcgttctctgtaaaatatttttacagtcgtcttcgccatttaacaagagtccgttcgcaggctttagcggaagtgcaggggcatttacatgaaagggttcaagggatctctgttattcgcagctttgctattgagcctcatgagcagaagcaatttgataagcaaaattcaaattttctacaaaaagcaatcaatcatacgaattggaatgcaaaaacatttgcagtagtgaataccattaccgatttggcacctttaatcgtgattacatttgctggatatcaagtcatcacagaaagtcttagcgtaggaacgatggtagcatttgtggcctatattgaccgcttgtataatccgcttcgccgcttggtcaattcatcgactacgctcacgcagtctgtggcatctatggaccgggtgtttgagttcattgatgaagaatacgatattacagacaagaaagatgcaaaagaatgtactgagcttcatggaaaggtgcagtttgagcacgtttcatttgcttatgaagaagaagaaaaacctgtgattcatgatattaatttagatgtagaaaaaggaaaatccgttgcgtttgttggaatgagcggaggagggaaatccacgcttatcagcttaattccgcgcttttatgatgtgacagagggtaaaattctcattgatgacattgatatcaaaacctataaagtacgcagcctgcgagataagattggaatcgtcctgcaggatacggtgttgtttagtgacacggttaaaaacaatatactgcttggaaagccaggagcgacagatgaagaagtaattgctgcggcaaaagccgcaaatgcccacgattttattatgaatttgcccgaaggatatgatacaaaagtgggagagcggggaatgaagctatcaggaggacagaagcagcgtatttccatttcgcgcgtatttttaaaaaatccagctattcttatttttgatgaagccacttcagctctagatttggaaagtgagcactatattcaagaagcattagctgaactagcaaaagaccgtacgactttcattgtagcccatcgtttatctacaattactcatgttgatgaaattgtacttttagaaaatggaagagtagtcgaacgaggttctcatgaggagttaattaagaaaaaaggtcattactatcagctctttaacgttcagcagcttgatacaatttaaaaacaccacctattgtctaacaataggtggtgtttttaatcttcttgtcgttgatgattaatatcaaatgagttagcatccttgtgatagttttggaacgtatcaatcagcttatcaagatgctctaactcttcactatactcaatgatgacagaaattaaagggaagatatgataaataaccttattctcttcatcattatcgtatattttgtactgcataaatttatcgattaaagctcgttttccaacgcaggcttcgtttggtacagtagtggttggctgtacgcgtaatttcccaatgaattttaataatacttgctcatgatacattaacaggcactcaacttcagatttgattaaatcttgaaattgctgcggcatgacttgaagatcattttccactcggtgaagtagtttcaaggttgtaagagctcgtgttgttacggtaatcatttgacgaaataaaacgagcttgcgtgacttaacaaaacgttttttggttgaataagtgcgttcttctttgtaaaaatcaaagatttgattcattttagccacattgtctttcattttttcaatgtcttcttttaacaatgtgtgctcagatgcgtgataaagattcatgcgaatccatttaataatttcttccgttgtgcttacaattttataatacaaccttgtttcatactttggcggaataaaaataagattgacaataaatgctgagaataccccaagtaacactgtaccaaagcgtataagtgcatattcaacgaaattatctcctggattttccatgattgcaattactgtcacaagcgcaagcccaattgtattattaatacgtaattttaagttaactgcaatgacaacaacagcggtaaaaccaataatgatgggatgggtaccaaaaataagtccaaaacaaactgcagaagcagctccaatcacattcgcctgtatttgctccaatattgttaaataagatctgtaaatagacggttgaattgcaaaaactgccgcaattgccgcaaatattggagatggtaaacttagaaattcacctaataacaatgaaagtgtaatggcaattcccgtttttaagatgcgggcaccaagtttcatgtgcgttcgtagttcctttctgtaaaaaagttttttcgttatgaagaatgttccccaaaacaaatgataaattgcaaaaatcagtccttctttattacataacctgttggaaataatataaacaataacatactatacaaggtttaagaatggatatcaagagaaaacaagcagaaaaataagggtatttctcgggatttttcgacaggctgaaaaaaaggagatgacgcgtaagaaatggttatgaaaggtgggaatgttctataaggaaacccgaaggtaaaacgaaaaagaggtcgagacataacgaaataaatccaatctaaagacgaacaaataggatacatgaactgaaccgcttgtgacacagcacttgatttccgcagcagtcttccacttgcccttcaatcaactgctagaaagacctgtacacacgaaacctacgtttaccataacaaaaaaacgaaccactaatcaaacatcttgatcaatggttcgtttttcacttcgtctaaaatccttttatttcagcctctttagaataagaattaacgttcttcacttaattgtttaaatgctttttcgactgcttctaatgtgtcggtaatatcttgttctgtatgagctgtagtaaggaaccatgcttcatatttcgaaggagctaagttgacaccttggtggagcattagtttaaagaagcgtgcgaataattcgccgtctgtattttctgcttgttcatagtttttgaccgtttcggttgtaaaatagacagtaagagcgccttttaatcgattgatagtaataggcatgttatatgtacgagcatgttttaaaataccctcttcgagcatcgcccctaacttatccaactgttcataaacaccttcttgctttagtacttctaggcaagcaatcccagaaagaatagaagctgggtttccagccattgtacctgcttgataagcgggtccaagcggcgccactttttccatgatttcttttttaccgccgtaggctccgattggaaggccgccgccgatgatttttccaaatgcagtgagatcaggttttacaccaagtaaatcttgagctccaccgtacataaagcgaaacgctgtaataacttcatcgtaaataacaagtgctccagcttcgtgagttaattcattaacttgttctaaaaagccaggttccggctcaacaattccgaagtttccaacgattggttctactaaaacagctgcaatctgatcgccccatttttctaatgcttccttgtaaggctcgatgtcgttaaaaggaactgtgatgacttcgttagcgatactttttggtacaccagcagagtcaggagtgccaagtgtagaaggaccagatccagctgctactaatacaaggtcagaatggccgtggtagcaacctgcaaatttaataattttatcgcgtccagtataagcgcgtgctacacggatcgttgtcataacggcttctgttccagagttgacgaagcgcactttatctaatgcgggcatcgcttctttgagcattttagcaaatgtgacttcatgagcagttggcgtaccgtaaagaacacccgtttcagctgcttttgtaatagctttcgtgatatgaggatgagcgtgtcccgtaatgataggaccgtaagctgctaaatagtcaatatatttatttccatcaacgtcccagaaataagctccgcttgccttctccattgcaacaggggctccgcctcctacggctttatatgaacgtgaagggctgttaacgccgcctacaatatgctcgagcgcttcagcgtgtaattgttctgattttgtaaattgcatagtatgcctcctaatgaaaagttcaacttctttattctatcaaacttatttgtttcttgaaaaacattcgagaacgtgtatgatagaaatttgtgagctaactgctagaaaatagttcctcgtctcttggaggagttgctagcaagggcgccggaaacaataaaagaaaccactaatacgtcaacgtaacggagggaatacaatgaaaaatgctattgaggtgaatcaacttcggaaagaatttaaagcctattctagccgctctggccttaaaggggcattccgggatctatttacccgtaattatagagtcatgaaagctgtgaacgatatatcgtttaccgtaaaacaaggggaaatggtagggtatataggagaaaacggagcggggaaatcgaccacaatcaaaatgctgacaggaatcttaactcctacttcaggcgacattaccgtaaatggaatgaatccccataaggaaagagaaaagtttgcccaaacgattggtgttgtttttggtcaacgctctcagctgtggtgggatattgccgtacaagaatcttttcgcctgttaaaaaaagtatacaaagtgtcagatgaagattataacgttcacatggagcacgttattcaaacgttagatatcgggccgctgctagataagccagtgcgaaagctttctttaggtcaaagaatgcgctgtgagctggctgctgctcttattcacaatccgccgcttctatttttagatgaaccgacgattggtttagatgtactagttaaattaaaaatccgtcaatttttaaaagaaattaatgaaaaatacaacacgacaattttgcttacaacacatgatttagcagatattgaagctttatgtgaacgcgttgtaatgctggatgaaggcagtattatttatgacggatcgctgcaaaagttgcgttcgaactggggcgaccttaagcaggttacgtttgaattcggaactgcgccaaataaagagcagttgaagctattgacgcaaggaatgcctgttaactggattgaaggtgatcaaaaatatttgtggacagcacagcttcaaaataaaggagacttaatgtcgcagctgattgctaaagtggtggcaaagcatgaaatcagcgatattaacattgaagaaatttcgacggaagaaattattcgcaacatttatgaagaaggtgttgtgaatggataaatatatagagatgatacgcattcgttttttaatgatgctagcgtatcggacgaattattacagcggaatattgatttatgcaattaatattggtgcttactattttttatggtccgctatttatggaggaaaagagaatattcaaggtttatccatcactcaaatgacaacgtatgtagccgtttcatggatggcaagagccttttactttaataacattgaccgtgaaatggcaacggaaattaaagatggcaaagtggctgtagagttaattaagccttatagctaccttggtatgaaaacgatgcaaggactgggagaagggatttttcggctgctgtttttctcagtgcccggcatgattattgtcgcgtttttatttccagtacagttctcagcaaatgcagcaacatggctttattttggactgtctttaatttttagtttcattatcaatacacaaattaatttattaacgggtattacgactttctttctctttaacaatgatggactcattcgagcgaagcgcgttgttattgatttgttttcaggacttcttctgcccatcagcttctatcctttctgggcgcaacatattatgagctatttcccttttcaagccattagttatattccgagcatgattttcacaaatggatttaaagggcaggaagtaataaatgctcttatcacacaagcagtttggtcaggacttctatttatccctattgcatgtttgtggaacatagcgaagaaaaaaatggttattcaaggagggtagtctatgaaaatgttttatttttcgattttctttcagtacatcggtcaatatatgaaaacaaggcttcagtatcgtaccgacatggtagttgaaatcatatcggacttattatttcaaacggttaacttaatttttattttagttgtatttggtcatactcagtcgctgcacggatggtcacgagaggaaattatctttatttatggtttctttttagttccttttgctattttttcgtctttctttaacatttgggatttcaatgaacgctacattgttaaaggagaaatggaccgaattttaacgcggccgattcatagtttgtttcaagttattttggagcgaatggagctagaatcattgtttggtggtgtcactgggattgccgtaatggcttacgctgcgtcttctttacatcttcatttccagtggtatgatgtttttatttttctattatttattttaggaggagcgcttgtatacgcaggaattttcatcgccttagcaagcataggcttctggtcggatgccagaacctctattatgcctactatttataatattggaaactatggaaggtatcctgtagatatttataataatgtcatccgatatgttttaacgtggattcttccttttgcatttgtaggcgtatatccagctgcttatttcttaggaaggtcagaatggtatggatatgcatttttaaccccagttatgggaatcgtcttttttgtaatctctattttcttatggaatacaggggtcaaaaaatacagaggagcaggcaattaaatgcctgctctttttggtggattcggagtagtaatgattggacaagaacgcgcgtatagtggtagtaagagtataaattaaaggagtagaatgatggttatttttctaatcctcgttatcattgtttttgtaattggtagtatgaagtttctctttgaaaaagaacttggagaatttcattttttctcaattggtcatttctttgtcttgttttattcatatattacagttttattgggatttagccttatttatacagtatgtgagatggggagtattccagtattaagcggagggtttgaacatgaaggtcattatttctataccctgtttaacagtatgtatttcagcgcagcgacgttattttcagtaggctacggagatatgtatccggttggaattgggaaattatttgcaacttttgaagcgtttatcggctatattatgcctgcaatctttgtgatgcgaactgttacccgcacttaaacttgtcatcttatctaatattaggtacgctattcaaagaaaatgaaaagcgtaaaggagaagataaatatgacagctgtagttggagaaaaagcacccgattttgtattgatgtctacaaatggagagcaagtatcactagcgtcgatgaaaggaaaaaacgttgtgctgtatttttatccgaaagatatgacgccaggctgtacaacagaagcctgtgatttcagagatcagcatgaaaattttgaagagctagatgcggtaattctaggagtgagcccggatccaatcgacaaacaccataagtttattgataagcacggccttccattcttacttttagctgacgaagatcacagcgtagctgaagagtatggagtatggacactgaaaaaaaactttggaaaagaatatatgggcattgaacgctccacttttatcattaataaagaaggaatgctcgtaaaagaatatcgtaaggttcgagtgaaagggcatgtggaagaagctttatcatttattaaagaaaaaatggcataaaaacaggcagataactagagcagttttagtctttgaacatacaatatcagtgtagggcatacctcctcagatgttaatatatttaaaagtgtggattgatttccacacttctttttttgcataaaatatatgaaaagtttctacttattacataaaataggaataggcatcaagttgacaaaacgtgggtaaaacatgtagactaattataagaattataaagtaataatacttacagaagaggggtgcatgacgtgtcaaatcatttacaagaagcccttgaaacgttaaaaggtactggcgttcgtatcacaccacaacgtcatgctattttagagtatttaatcaattcaatgacacatccaacagcagatgatatttataaagcgctggaaggtaagttcccaaatatgagtgtagcgaccgtttacaataatttaagagtatttcgcgaagtaggtattgtaaaggaactaacatacggtgatgcatcaagccggtttgattatgttacaacagagcattaccatgtgatttgcgaaagctgcggaaaaattgtggattttcattatcctggtttagacgaagtagaaaagctggctgctcatattactgactttgatattagtcaccatcgaatggaaatttacggaacgtgtcctgattgtacggctaaaaaagcgcattaataagctgatagtagtgatactatcagctttctttttgtttttttctattatacttttcgtcgaattgttttccttcaagagactggtcaagcgtaagcggctcgttgcaatacatacacatatctacgcgccctagcattttggtttgcttttgacatgtagggcaggttacttgaaccgcttttgtagaaagcatgccaatccagaaataaacgccggtactagctacgatgcacagcaaacccaaaagcataaaaatagtcattagccagactgaagatcgaaagaaaattcccccatacataacaatgaacccaacaaagatcagactgagtgcaaacgtgcgaatcttgttaattttatttgaatactttatccccatcagtatcccccctgttaccaatatatcatagagtgagacaatgaatgataatgaaaattgaatcttcggaaaattattgttggtttttgagctttctgaatgatttccataattctgagtgggatatccgttatacatcgtatataataaaaaaagaaatcttagtccatagcctttaaaattttgaaaaatatttgtttattacagttaggagagctcaaaatggaagatgttttacggccaatatatcaagaaagagctagcaataaagacacactaggtattttactgattgaaaaaaagaaatcagaatctccagtgacggataatttggatgctatcttatttattgtgaccaaaactacagaaacttctctttttattaaacaatacgaatatgaaaatgagcgtgcggcactttatatggcttctgaacagcaaatgagtgaatggattatgagggggacgaaccgccgtattattgattggatcttaaatggtaaagtgctatttgatcgaaacgaatatatggaaaacttaaagaaacgcttaattgattttcctagagaagatcggacaaagagaataggtgtcgagtttgctaagttgattcgccgatttaaagaaggaaaagacttttatgcgtctaatcattatttagatgcattcaatcatgtcattcatgctcttcatcatttagcacgactgtctgtgttggaaaatggatttcacccagaagtgacagtatggaaccaagtgaaaaaaatagaacctgaaattcatcgtctttacgaagagctaattattagccaagaagaggttagcaagcgtttagagctgcttttcttagcgagtgaatttctagtaaataaaaaaactgaattaggtgccaagcatcttgttcatattatgaaaagtaaaaagcaggaatggacgtttaatgaactggttcatcatcccgaaatacgcccttatgctattgatttaggaatacttcttgagtttttaattgaaaaagatatcattatggtaaaaaaagtagaaaccaaaggaaagagtttgtaccatagacactatgtggcgaaatgatagagaggataaagggtatctgatacggtgcggttatggcgtgtagataccctgacatatgactttatagcctggataaaaggtttttctaaaaaaacacgatttattttaaaaaatctattgacgctttaaaatatccgtggtaaatttatatacgtcgccaatgagcgatactaaatttatcaaaaacttgaaaaaacttcttaaaaaagttgttgacaagaaagagataaactgataagataaaaaagtcgcttaagagcggcggttgaactttgaaaactgaacaaagcgacaaacgtcaacgttaaattttattttttattaattgagcaagtcaaacatttcttcggagagtttgatcctggctcaggatgaacgctggcggcgtgcctaatacatgcaagtcgagcgaactgattagaagcttgcttctatgacgttagcggcggannnnnnnnnnnnnnnnnnnnnnnnnnnnnnnnnnnnnnnnnnnnnnnnnnnnnnnnnnnnnnnnnnnnnnnnnnnnnnnnnnnnnnnnnnnnnnnnnnnnatgctcaagcatctaaaaacaatttcggtactgaatttggtagcgaaacaaatgtacaagaagtgaaacaacaaaatgctcaagcagcggcaaacaaaagccaaaatgctcaagcatctaaaaacaatttcggtactgaatttggtagcgaaacaaatgtacaagaagtgaaacaacaaaatgctcaagcagcggcaaacaaaagccaaaatgctcaagcatctaaaannnnnnnnnnnnnnnnnnnnnnnnnnnnnnnnnnnnnnnnnnnnnnnnnnnnnnnnnnnnnnnnnnnnnnnnnnnnnnnnnnnnnnnnnnnnnnnnnnnnatataatatgtctggtggcgatagcgaagaggtcacacccgttcccataccgaacacggaagttaagctctttagcgccaatggtagttgggactttgtccctgtgagagtaggacgttgccaggctgttattattccacagtagctcagtggtagagctatcggctgttaaccgatcggtcgtaggttcgagtcctacctgtggagccatttggagagctgtccgagtggccgaaggagcacgattggaaatcgtgtaggcggttaacgctgtctcaagggttcaaatcccttgctctccgccatttttatttaattagcacagtggcccgttggtcaagcggttaagacaccgccctttcacggcggtaacacgggttcgaatcccgtacgggtcaccatttattttcatctacataatagtggaggattagctcagctgggagagcacctgccttacaagcagggggtcggcggttcgatcccgtcatcctccaccatatattatcatcgcggggtggagcagttcggtagctcgtcgggctcataacccgaaggtcgcaggttcaaatcctgtccccgcaaccaagtggtcccgtggtgtagcggttaacatgcctgcctgtcacgcaggagatcgcgggttcgattcccgtcgggaccgccattttaaatttaataaggctcggtagctcagttggtagagcaaaggactgaaaatccttgtgtcggcggttcgattccgtcccgagccaccattttaaaaacatttgtttttaaaatgccggtgtagctcaactggtagagcaactgacttgtaatcagtaggttgggggttcaagtcctcttgccggcaccacagttattgtggaggggtagcgaagtggctaaacgcggcggactgtaaatccgctccttcgggttcggcagttcgaatctgcccccctccaccatttacaggggcatagtttaaaggtagaactacggtctccaaaaccgtcagtgtgggttcgattcctactgcccctgccaattataaaataacattgcatatagacgtggcgattgtggcgaagtggttaacgcaccggattgtggttccggcattcgtgggttcgattcccatcagtcgccccatttataaacgatatgcatgttccaatattgggctatcgccaagcggtaaggcaacggattttgattccgtcatgcgttggttcgaatccagctagcccagccatatatgcggaagtagttcagtggtagaacaccaccttgccaaggtgggggtcgcgagttcgaacctcgtcttccgctccaattttaataaagttatttagtcttgagtaaatggcggcatagccaagtggtaaggcagaggtctgcaaaacctttatcaccggttcaaatccggttgccgcctccatttatttacaagctgccggggtggtggaattggcagacacacaggacttaaaatcctgcggtaggtgactaccgtgccggttcaagtccggccctcggcaccatttataattttaacttgccttttttattttgccgatgtggcggaattggcagacgcgcacgactcaaaatcgtgttccttcgggagtgtcggttcgaccccgaccatcggtactttagctttacttgacaggatgattcctgtttttatttttacttatcggtcgacaaattttgataatatttgcgggtgtagtttagtggtaaaacctcagccttccaagctgatgtcgtgagttcgattctcatcacccgctccatacatattgttatcacaacgcagtgtctcgctttcaaagctgagatgttgcgttttttatttttagcgtaaatatagcgtctatcttgaaaagatagacgctatatttacgtacatcagttaatgacttgataggttgctgcgccgccgtgaatttgaatgaacatgtcacttagggatttagttagtttataagcctgttcttctgaaagtgaaggctttaaataaatgaactgtacagcttgtgttgtcttttcagttacgtacgctcggttagaatcgacataagggcttccgaaagctcctagggcatctttagaaatgattttattttctaaagaaatgttacgttcatttagagcttcataagactcttcttttttaccgatagtaaattcgatggggccttctaaattagaggaatcataaattccaattgggacttcatattgcaatgaaaaaaagttgttaatgtccacagcagaattgatagaaggcaaatacgtttgttttcctattcttctaattaaagcttctatagaaggacggtatttacttggatcagttccaaatgttttgaaaagctttctccactcgctaacaccttcgaattctgttactttttttgactcaaggtcgaaataaatggattcttgaaagaggcgcagacgtccttttagcatttgaggagaatcaccaacttcaatatttttatattgaatgattcccattttaaaagaagggcaaagctgtttaatagcgggcgataatgtaaagttcatttttttgatcctttctattataattagtatttgttcgtttatagataccatcctatcatttcgttgagtgagaaaacagttcaatgcatgaatatatagaatttcttagaaaggaggccattattcactatgaatgcgtatcagttgaaggaagaaattatttcatatagcaaagagattggaatcgataagattggatttgcgagtgcttccatgtttgatgagttaaagaatcgattgttagcacagcaagagttaggttatgcttcaggctttgaagaacctgatattgaaaagagagtagatcccacattagttgttccaaaagctagatcgattatttcaattgcacttgcgtatccttctaaattaaaggatgcaccaaagagcacaaaggaagatcgtcgaggaatcttttgccgtgcttcttgggggcaagattatcatacggttctacgtgataggcttcaaaagcttgaaaccttcataaaagaaaaagtgcctgcagctatccttcaatcgatggtagacacaggtgagctgtcggaccgagctgtagcagaaagagctggtattggctggagcggtaagaactgtgccattattacacctgaatttggttcctacgtgtatttaggagaaatgattacagatatcccgtttcctcctgataaaccgatagaggacggttgtggtacttgtaataagtgtgttgatgcgtgccctacaggtgcgcttgtaacaggtggtcagctgaattcgcagcgatgcattgcctttttaacccaaacaaaaggatttttagctgaagaatttcgaagtaaattaggcaatcgtttatatggctgtgatacatgtcaaactgtgtgtcctgaaaataaaggaaaagactttcattttcaccctgagatggagcctgacccagaacttgcgaagcctaaattaaaaccgcttttaacgatgagtaatcgtgaattcaaagagaaatttggacatgtttcaggttcttggagagggaaaaagccaattcagcgtaatgccattattgcactggcccattttaaagatcaaaccgctgttccagatttaattgaattaattaaaaatgacgttcgccctgtcattcgaggaacagcggcatgggcgttaggcaaaattggcgataaagaagcgttagatatacttatgaacttaagagaaaaagaaaaggaccaagaagtaattgaagaaatgtcaaaaggtatagagatgcttcaagagatctaaaccttatttttattgataaagttagctaatgagtcatagcgtataataaacgcttagaaaagtggtgacattatgctaacaaaaaggaatgtattatatactttaattaaagcgcgtgcggacagctatgtaaaaggtgagcttcatgaagactttaagcctttcattgaacatcagtgtgagctaaagcggtctcttataaaaaaaagagaagttgatgttttaaaatgtaatatgaaaggttctattcaatctgctcatacggatcaggaagaaacaagagtattatataaggtgcacattcaggcatttttaaaacaaaacgattttttctatatagaagaagaaattgaagatcgtttagctcttttttataaagatacgcttattcaagatgagctgctggtaaagggtttttctgaagataaggctgaaatggatgtagaagaagtagaggaagacgaagaaagagcctcttattatgatcgtcttgcggctgttcagtatgcagaaaaacattgggataaacctaatgagagttataagcagtttgaggtaaactgcaccaactatatttcacagtgtttgcatgcaggaaaggcgccgatgcggggatatcctaaaaaagcaaacggatggtggatgagagggaacgcctggagctatagctgggcagttgctcattccatgcacagctatttaagtaactccaaatcaggacttcgggctgtgaggaaatcttcagcaagcgaacttgtcccgggagacgttatctgctacgattttgaaggagatggaagatggaatcatacgacgattgttgtagcaaaagacggtcacggtatgcctcttgtgaatgcgaacacgtataatagtcgaatgagatattgggcttatgaagattcaacggcttacacgccaaagattaagtatgattttttccatatcgttgatcggtaagtctttcgttttagcaagttagtggtataatgatgaatagatttgttagcagaggtgaaaatttgtgggagtacacgtagtgttatttcaaccagaaattccagcaaatacaggaaatattgcgcgaacatgtgcagcaacaaatacgacgctgcatttagttcgtccgttaggcttttcaacagatgataaaatgttaaagcgagctggattggattattgggaatttgtaaatgtggtgtatcatgattcattagaggaagtattcgaaaagtatcctgaagcaggtttctacttcatcacaaaatttggtcagcagccacacacaacatttgattatagtgacttagagcaggatcatttcttcgtatttggaagagaaacaaagggtctgccaaagcacattattgaagagaacatggaaagatgtcttcgtttaccgatgacagaaaatgttcgttctttaaatttatctaatacagcagctattttaatctatgaagcgctgcgtcaacaaaattatgctggtttatcttaagtaaaaagcgaggttcaaattttattgaacctcgcttttttatttatgtcgacgatgatatgtagtggttattttttaacgcccggtttatcattgtatcccgctctgaagatggatgctaaaaaagcaattgttactcctaatactaaaagtaagcgcattgattttcctcctcaatctaattaaaaggattatatagctactgcagttaaaaccgacttcccatatctcatgatgataataatgacaaaataactcttctagagacataagttctctaacaaagtttagccgttccttcttactcttttattatagctaataaatactttactgtgaatgcctagcaaggacaaatttctgaattttacaatttaaaaagcatgttcaaacattttgctgcatagattgtattaatcttgttcactagcaccataactagtaggggaggtcctttaatggatatattaaagaaagttgaaagataccgcgaagaagagaatcgtcttaagtgggaagggacatttgaagagtacctaaagctgattaaagatgagcctttaattgctcagcctgcacactctagagtatacaacatgataaaggatgcaggaattgaagaggtaaatggtaaaagacattataaatttttcagtggacaaatgtttggacttgaagattcgctagaacgcttggtggaagaatattttcatccagctgcaaagcgtttagatgttcgtaaacgtattttacttttaatgggtccagtaagtggtggtaaatcgacgctagtgaccatgttaaaaagagggcttgaagcttattcgcttactgatcgaggagctgtttacgctattaaaggatgcccaatgcatgaagatccgctgcatttaattccacatcatttacgtaaagacttctttgaagagtatggtatccgaatcgaaggaaacttatctcctttaaatacaatgcgattagaggaagagtatggcgggagaattgaagacgtcattatcgaacgcattttcttctcagaggacaaacgaactggaattggaacgttcagtccttctgatccgaaatctcaagacattgccgacctaacaggaagcattgacttttcaacaattgcagagtatggatctgaatcagatccgcgtgcttaccgctttgacggagagcttaataaagcaaaccggggaatgatggagttccaggagatgttaaaatgtgatgagaaatttttatggcatttactctctttaacccaagaaggaaactttaaagcaggaagatttgctttaattagtgcagatgaattaatcgtagcgcatacgaatgaaacagagtatcgctcgtttatttccaataagaaaaatgaagctttgcattcacgaattattgtaatgcctgttccatataacttaaaagtgagtgatgaggaaaaaatttatgacaagatgattcgtgaaagtgacgtatcagatgttcatattgcccctcatacgttacgtattgcttctatctttactacattaacgagattaaaagagcctaaaaaaggcgatatcgatttattaaagaagatgcgcctatacgacggtcaatctgtagaaggctataacgatgcagacgtagaagagttacaaaaagagtatacggatgaaggaatgagcggtattgatcctcgttatgtcattaatcgcatttcatctaccatcattcgaaaagatattaaatcaatcaatgcattagatgtactgcgttcattgaaagaagggctggcacagcatgcgtctatttctgctgaggatcgagagcgttacctgaattatatttctctggcgcgtaaagaatatgatgaaattgctaaaaaagaagtgcaaaaagcgttcgtttattcgtatgaagagtccgctaaaacattaatggataattatttagataatgtcgaagcatactgcaacaaaaataagcttcgtgatccgctaacaggagaagagttaaatccagatgataaattaatgcgttcaattgaagaacaaattggtatttcagaaaatgcaaaaaaagcattccgcgaagaaatcctaattcgtatttcggcttatgcacgtaaaggaaaacgatttgattataattcccatgagcgtttacgcgaagcgattcagaaaaaattgtttgcggatttaaaagacgtagtgaaaattacaacatccactaaaacaccagatgagcagcagctgaagaaagtaaatgaagtagtggctcgattgattgatgagcatggatacaattcagtatctgctaatgaactgctgcgctatgtaggaagtttgttaaatcgataactcagtactaacaagaaaacatggcacttccgatctgtgccatgtttttcttatctcttaaaataaactctgcataattaggctaatgtgtagtacgcattgcacttaaccatcatatgataagtcataaacatatacatgacactagacactataaaatgaatagttaatagtgaaagaattagttagcaagtataccattcttgcgcataggataagagtaaccaacctttgaactaaaggtatttgtcagaaactttcggtatagcttatgcatgccgagtaaaaacgtgcaggtgttttttaaataaggaggggaatagcgtgggaaaagaagtagataaaagttttgctgtctcaaaagaagactggtccctccatcgtaaaggccacgatgatcaaaaaagacatcaagaaaaaattaaagaagcaattaaaaataatttaccggatttaattacagaagaaaatatcgtgatgtccaatggaagagaagttgttaaaattccgatcaaatcattggatgaatatcgaattcggtacaattatgataaaaacaaacatgtgggtcaaggtgatggagacagtaaagttggggatgtagtagcacgtgatggatctgctggagatggtcaaaaaggagcagggaaaggtcaaggagcaggtgaccaggctggagaagattactttgaagcagaagtgtctcttatggagcttcaagaggctttatttgctcaattagaactgcctaatcttcagcgaaaagaatctgatcaaattgttgtggaacacattgaatttaatgatatacgacgtacaggtttgatggggaatattgataaaaaacgaacgatgatgagcgcttataagcgaaacgcaatgacaggaaaggctgcttttcatcctatttatccggaagatttaaaattcaaaacgtggaatgaagttataaagccggaatcgaaagcagtcgtcttagctatgatggatacgagcggttcgatgggcatatgggaaaagtatatggcacgaagctttttcttttggatgacacgctttttacgtacgaaatatgaaacagtggaaattgaatttattgcgcatcatacagaggcaaaagtagtatcagaagaagactttttctccaaaggagaaagcggaggaaccatctgttcatctgcttatcgaaaagcgcttgaattaattaaccaaaagtatgatccgagccgctataatatttacccgttccatttttcagatggcgataacttaacttcagataacgcaaggtgtgtaaagttagtaaatgaattaatgaaagtgtcaaatatgtttggatatggggaagtgaatcagtacaatcgacattccactttaatgtctgcttacaaaaatattcaagacgaaagttttagacactttattttaaaacaaaaatcagacgtttttcacgcgatgaaaagcttttttagaaaagaaacagaagaccagaaatatgcgtaacctaaaaggcctagacttgttatctaggtcttttttatgcggtttattcagcgcttctttggagatagtaaaagtacgactttatccaaaaggagaataagtgaatgaacgaaaatataaagagcgaaatgcaaaaacatcaacaaaatcagcggttgaacgcagctgagttaggttacttatgggcgcaatatttaggcgatacgctgtatgtatgtgttcttgggtattttctatctgttgtaaaagatgccgagattaaggagctcttaaaaaaagcccatcagatttcacaaactcatgtagacgaattgacggaattattcagttcagaaaaaattccaataccagtaggttttggggaacaagatgtgaacaaaggagttcctgctttatttgatgatatttttatggctatttatgtaaatgaaatggcaattggaggtatgaagaaatatgccagagccctaagcgcagtgagaaggcaagatatttatgatcacctgtctcgatgtgtaaaagaaagcgacagtcttttagagagttctaaccacgttattttaagaaaaagcatgctgatgagacctccgtttattccttatcctgtaaaagtgaattttgtggaccagaaaacgtttatatcaccacttttctctcaaatgcatcctctaacttctttggagattacggctattcaagaaattgttaatacaaatgtattaggtaaaacgctgatgctggcctttagtcaagtagccaccacacaaaaattacgctcttatttttttgatggagtcaagcttgcgagtaagcaaatcaagcactttaccgagttactgtctgaagctgatttaccaagtccgcgtctgcttgatgcgtatgtaaccaactcaacgatttcaccgttttcagataaactgatgatgtatcatacttccgcagcggtgacgatcgctattgataactgcggtgctggcttgtctatgtcgttccgttcggatgtagcagtagaattttctcagctaattggacgtataggaaagtacggaaaagatggaattcggattatgattgagcaaggttggatggaagaacctccaatggcaacagaccgtaagaagttggcggagaaataataaggagcatgttgtgggttatcagtaattttgcggtactgaaacatatatagctaagcgaaaatagattgctctagacccacttgaatgagcagtgataagataaaaaagctgatttttcaagaagtaagtcgaggtgtggaaatgaacaacagtataagggagtccattgcgaaaaaagtagcatggattagcgtatggagcaatattgctcttacgctaggaaaagtaatagtaggatggattggaaatagtgatgctgtatttgctgatggtattcactctgcagcggacgtatttgcctctattattgtcttattggttatacgagtagcaaataaaccagcagatgatgaccatccatatggacatggaaaagcagaagtgattgtctcaggaatcgtaggaattattttattgcttgtatcattttatgtggtatttgaaggagtcgttggtttattccatccggttgaatctccaaatattttagccatgtggattgctgttatttcatacatagcaaaggtattgttgtaccgttattctttaaacgtagcgaagcagcaccacagtaaggcaattgaggcaattgcttttgatcataaagcagatattgttgcttctattgcagcggcaattggtgttttattatcgattattggtgataaaatggatgttcaactgctgttatacggagataaaatagcaagtatatttgttgcttatttaatttttaacattgccagacaaatgatgggagagtcttttcaaatcttaatggaaggcaatattgatgaagagctactgaaagaacttgaagaaagcatttatgaatttgaagatgtgaagcggattgatcgcgttcgagcaagagaacatggccattacatattagtggatgtacgtatttcgattgaccactttaaaacaattaaggaaggtcatgatttaggacgagaaatcaaagcaacacttatgaaaaaacatgataatattcaggaagtattaatccatttgaatccttattatccagattaaataagaagcagcgaagtgttactcgctgcttcttattatttatatatgtagaaattaatgaaatgagtagcataaaataatgaggatttttatttataaagaatcaagtttaataaaattgtataaagggaattgtatttatttattgatgtgataggataaaaaagcatgtaaatgcattcactacgaatgaaagcagtggacgggtacatatagataataataaatggttttgggagtcaaagaaggtgatgttgaagtgaatgtaagcatcaggtcaatcgttaaaaaagtcatgttcattctatttattgcgtatacggcagtggtcatttatgctactctcatacgggaaaacgaacatgtttacggaaaagcaatgaacttggatttatttagcacgatctgtctgatgtgggacagcgggaatataatgctcactctgacaaatatactggggaatatcgtgatgtttgcgccgcttggaatgtttatccctttgtttatgaagtggtttgacggttttattcaagtgtttacgacaggtttcttaatcagttttctgattgaaattttacagtacaagctaacagaacgagtatttgatattgatgatatctttttgaatacgctaggtacatttataggctgggttattattaaaatactatattgggtcaagaacgtgctgaaagcacgtttcaaaaaaagataaagagatggagacataactgaatcaatagctagaaagcagctacagatatgaagtctacgtttaccatcacaatgaaaagatccgaacgatgaatcgttcggatttttcttcaactaaaatatttctggctcagcttttgcttcttgctgatagaaacacttaatgcagcgtcttacggaagaatgtgaggattcaacgataatgtgctgacaattttgctgaacaaataataactttctttcaagctgcttaatttgttctttaagctgttctacttcattattgatagatatttgaaccactgttaacaaactctttagctttttctttcattccttcttttcttacttcgtttacatctttttcattttcttgagccatgttacgaatatcttgagaaatacgcatcgaacagaatttaggtccacacattgaacagaaatgggctgttttagcaccttcagcgggaagtgtttcatcgtgatattcttttgcgcgctctggatctagtgacaggttaaattgatcattccatctaaattcaaatcttgctttagacagcgcgttatcgcgtttttgtgctcctggatggccttttgctaggtcagcggcatgcgcagcaattttataggtgataacgccttctcgaacgtcttctttatttggcagacctaaatgttcttttggcgttacgtagcaaagcatagctgtcccaaaccagccaatcattgcagccccgatacctgatgtaatatggtcatagcctggagcgatgtcggttgtaagcggtccaagagtatagaagggagcttcttggcatatttccatttgtttatctacgttttctttgatgaggtgcatagggacatgtccagggccttcaatcataacttgaacatcgtgtttccaagcaattttagttaattcaccaagcgtttctaattcaccgaactgtgcctcatcattagcatctgcaatggaaccaggacgtagcccatcgccaagcgaaatagaaatatcgtatgctttacagatttcacagatttcttcaaagcgagtatataaaaagttctcttcatgatgagctaaacaccactgcgccaagatggatcctccgcgtgaaacaatacctgtcgtacgtttcgctgttagaggaatatagcgtaaaagtacacctgcgtgaatagtaaagtaatcaacaccttgctctgcttgttcaattaatgtatcgcgatatgcttcccacgttagatcttctgctacaccttttactttttcaagcgcttggtaaataggaacggtccctacaggaacaggcgagttgcggataatccattcgcgcgttgtgtggatatcctttcctgttgataaatccataattgtatcggctccccaacgcgttgcccatgtcattttttctacttcatcttcaatagctgaacgaatagctgaatttccgatattagcattgattttcacatggaatttgcggccgataatcatcggttcgctctcagggtgattgatattattagggataatcgcacgtcctcttgctacttcttcacgcacgacttcaggatccatctgttcacgaatagcgataaattccatttcgggcgtgatgattcctttttttgcatagtgcatttgcgttacattttgattttttttcgcgcgcaaaggtaaacgattagtgataaagcgctcatactgatctcttggatcaccatcataatacccgttatcctgtggctgaaccgtacggccttgatatgtttctacatcgtttcgttctgcaatccacttttcacgcagagccggtaatcctttttgtaaattaatttcataacagggatctgtataaacaccgctcgtgtcgtatacacgtacgggactattttcttcttccccaaaagatcctgtagtaggagactgatgaatttcacgcataggcactttaaggtcttctctagatccttggacatatactttgtgactgtttggaaaaggctttttcatagaaactgatacattttgttttgacattacatattcctccggtttcgcataaagtgtagctataccgaaccataaaaaaatcgggttctgtgatagacagaacccgatggaataggcgaaaaaagaataaacatatactattcttttcaagactacttccctccgctggtataacccaaatcaggttcaaagggttaaagagttttattgcactcttctctcagtctgagctatcagacacccctagtagaaataacattcaaattattcaatttacggcttaagtttaccatcattcagtaaaaaatcaacccttaaataaaaaaagctagacaattagcgttgtctagcagcatcgattgcaatcacaatagctgtaataatatgcatgataaaccctaaaaatggaatccaagcaatcagtgaagtaacaatccctagtatgtttccatacgcagataaccctcgtctattagctaaaatgagcgtgatagcatgaagaataaatccaataaaaagaggagtataactaaagcccataacaatccccgcgccaattaaaggaattcccagcaaggcttcatacccagcagtgacccatttcattgtacgtacatttccattcatagtaaaaagcctcctaaaaaagatactactatatacgagaaaagagagaaaaaagtttcaaattacttaggggatatgtcgtataagcaagcactagttgattaaaatgatagatgacagtaaaggggatggaaaaaacataatgatttagtcattttttatactaaagaaaaatagtctagatgattcatttttagctaagggaccggaatttataccgaacatagtgactgctttctaaaataaataaaagctgatatcgtgttttttgattatagcatgtaaggtttttattacgaattattaaagattcttatctttttgcaaatacacattgtatttcatagttttaacaattatgataaaaaagcaagtgtcaaaataggaaaatagttgagcatgtaaaacgaagcgataagcttattaatttgaaagaaaggcaaggtacatagctttatgtgggaaattattgtagcaatcattttagggattgtagaaggtttaacagagtttgctcctgtttcgtcaactgggcatatgattattgtggatgacctgtggttaaattccaaagaattattttcatctccagtagctaatacatttaaaattgttattcagctaggttcgatcttagcagtagtagttatttttaaagatcgtttcattaatttattaggattgggaaaaaagccagctgctccaattggaccgacaaatcgcttgaatttaatgcaggtaattgttggactgttacctgcaggagtgttaggacttttgtttgatgattacattgatgaacatttgttttctttaaatacggtactaattggcttagtagtcggagctgtattaatgattctagcagatttgtttggccctaaacgtccgcgtgtagagacggtggaccaaatgtcttatggacaagcactgggtataggactgtttcaatgtattgctctttggccaggtttttctcgttcaggctcaacgatttcaggaggggttcttcttggaatgagccataaggcagcggcagattttacatttattatggcagtgccaatcatggcaggagcaagtggactttcattggttaaaaactggcagtatttcacatcagatgcactaccgttttttattgctggttttatcagcgcctttatttttgcgctggtatctattcgctttttcttgaaattaattaatcgtatcaaattagtaccatttgcactatatcgaattgttttagcagctattctatattttgtatttttataaaaaaatacgcgtgttctttattcccttaaacttctaatagagactcaaagagcaagaaaaagctattgcaacattgcaatagcttttttgcataaatatatattatcgccttttgaaagcgttttataaacataggtattgacaaaacgtgtcgaaaaatagtaaattaatatttgtgcagtataaagttaagtaaaagtaagacttctgtttagttttattgactgtaaaaaacgtatgacaacgtatagatcgttttaattttataaaaactgaataataagcttaatcgtatagagcgggggaatcattatcggcagtaaagctgccttggggtgaatccttacaaaaggtaggaaactctcaattccgaatccgacagttaaccccgtttgcttcattgagagaaagagcccaaaatagcgtaagtaaaaggctgttctttcttaagaatagtctttttttgttttttcagaaaagtatatacaaatgtcatacatctttggggaggtacatctatgaaaaaaattcgttttggtttggctacgcagatttttaccggattaatcctcggtgttcttgtaggggtaatttggtttaatgatccgcgtgtagtaacatacctacagccgctaggagacctatttttaagattaattaagatgattgttattccaattgttatctcaagcttagtcgttggagttgcaggagcagggagcggtaaacaggtcggaaagctcggcgttaaaaccattctctattttgaaattattacgacttttgcaattgtaatcggtgtattgattgctaatattttccatcctgggcaaggtgtagacattcattcagcacagaagagtgatatttcacaatacgttgaaacatccgaacagcaagaaggaaagtcagtggctgaaactttcttacacattgttccgacaaactttttccagtcaattgttgaaggagacatgctagcaattatcttctttacagtgttatttgcacttggagtagcggcaattggagaaagaggaaagccagttgtacaattcttcgacggtgtttctcacgcaatgtttcacgtggtaaaccttgtaatgaaagtggcgccaattggtgtatttgctttaattggtgtaacagtttcaaaattcggcttagattcacttctttcattaggaaagcttgttatcttagtttacttagctttaattttcttcctacttgttgtattaggaggaattgcgaaatgggcaggaattaacattttccacttattccgctatatgaaagatgaactgttgttagcatacagtacatctagttctgagacagttcttccgcgtattatggaaaaacttgaaaagatgggctgtccaaaagctatcgtatcgttcgttgtaccaattggttatacatttaacctagatggttccgttctttatcaagcgattgcagcgttattcttagcacaggtgtacggtattgatttaacgatcgttcaacagctgacgctcattctggtattgatggttacatctaaaggaatggctgccgtgccaggaacatcatttgttgtattactggctactcttggaacaatcggtgttccggcagaaggattagccttcattgctggagtagacagaatcatggatatggcacgtacggttgttaacttagtaggaaacacactagcagcaattgtgatgtctaaatctgaaggcaaatttgaccctaaaaaaggtacagagatcatgagagccggctaatttataaattaaaaagctacttattctattcgaaaaattagaataagtagcttttttcataataattcctttattattatgggaattgaccctataatatgtaacatcaggtataaatatatccaaattttattcttacataaaagcagtcactggttcctttctttatcaataaatatagagatagcttagctagtagggggatagtagagtatgtggaaaaagcgaatatgggtcatcgcctcgatagtaatcgtatgtttgttaatcccttacagtttaccaattgtgtttgctttattaacagcattagcgcttgagggtattgttcaaaaattgcatcaatcttttaaaatgaagagagtctatgcagtgcttatgaccttcattttatatgttgtttcgctcatacttattggattttttattgttcggacaatcgttacgcaagtggttgctctttcaaaaatagcgccttcctttgtaaaagaaatctatgaaaccgcgatttttccaactattattaagtggaaatactattcaaacgctcttcctacagaagtgatttcttctatcgagcgcacgcttgaaaaaaccgtaaattcattagattctctattaaaaagtaccgtggaaatcatcattagctttgctgctactgttcctgggtttctattagagtttcttatttatttagtagcacttgtatttatcagccttgagctgcctgctattaaaaataaaattaagtcatttttaacagaagaaacgaaatataagctacaagttgtcatcactcagcttatccaagcgggggttggttttattaaggcacaaattatcttaagtgtcatgacgtttgtaatggcttatgtagggctttggttattagatgttccgtataccgcgctgcttagtttattaattgtaattgtcgatatcttaccaatccttgggacaggctcggtgctcgttccatgggggatttttgctcttacgcaagggcatgactcattagcaatcggcttatttattctatttggagtcattacggtagtaagacgtgtagtagaaccaaaagtattttctacaaatatgggtatttcacctttggctgcactagttagtttgtacattggatttaaacttttaggctttgtcggattatttttaggaccggctttagttattttatacgatgctcttcgtaaagtaggtattattcaaattaactttaaactataaaagtgctggataaaactagcgcttttttttattgaaacttttgtagtacgtaatacgtaaagagggaaaggaaaaaactatgccgcgttggtttttatctatcaatcggctaaattatagttttgcagtcttagatttaatgatatgaggaggagaatttttgttagagtcggttttactttctttaattgaagcgctaaaacagctctcttattttggcgtaattctagcattaacgtttgagtttgtcccggcagagcttgttttacctttagtaggttattgggtgtaccaaggtgatatgaacttgtatctggctatccttgcaggtacagtaggcggtgtttgtggaccgttgactctttatggactgggacgttacggtggacgaccgctggttttaaaatatggaaaatactttttggtgaaagaaaaagaaattgacgccgccgatcgcttttttaataagtacggtagcggggttgctttttttggacgctttattccaggagtgcgcacggctatctcttttccgtgcgggatggcaaaaatgaatgtatggctgttttctatttatacatttgtggcgatgcttccagtaacggctatttacgtatatttaggatataagttaggacctaagtggaaagaggtggggccgattgtgtctcaatatatgcagcctattggaatcggaattgttgttttaattgcattgttttttatcattaaatatgtgcggaataaacaagtagggcagagctgataaatcgaggaaaagagtgaggatatgtcagagcatgagcagttaagagtagagttacgaaaaattgaaaagtgggagaaagaccaaaaaggactttttttctgggagcggctggctcgtttgcctttttcagctttagataaagtaacgccaaaattcattcatcaaaaaatagaaaaattattagatgaaattgctaagtatgttgataatggaggccagtatttagctaatacgtctgccacgctagaaaaagcatcagcacaattacaagaaaagaaacagctttcgatagaggatattcagcatttatctctgaaagaaatggatgaattggcagagcattttattgaagtccgaaaaaagaacgcacagcttcaaggagccacaaccgggataggcgggatttttacactagctattgatgttccttttgtattagggcttacacttaagacactgcaagaagtggctgtttcttatggttacgaccccactgagcaagaggaacgaatttttatggtcaaatgcatgcagttttcgtcttctgacattgtagggaaacgtgcgattttagaagaattagcaagcggaaatcgaacgcagagcttgcagcagctgcaagggtggagagaagtgtttctaacctacagggacaacttgggctggaaaaagctgttccaaatgattcctatagcaggaatggtatttggagcgtatattaacaaacaagcaattagcgatataggggaagttggaatgatgctttatcgtaaaagacgtattttggaaaaagtctcacaatcgcaaaaataaaaagagactggtacgaaagtattttagttgaagaaaaatccgaacgagtttgattcttggttgagaatcaaatacgttcggattttttcattggtatagtaaatgtagctttcatgtgttaagtctagttccttaatcaaaataaaaagtaggaatggtaatagtattttttcgtctagcaatcagtaaataaataattccgattatactccatataataccgataaataaggatgttgtttctaagttaagccacataaaaaacaaaaataaactgccaagtaaaggcataagtacatatgaaatatatccactgaaggaccgcttattttgatgaataaaataatggataaaaaccgctatgttcactgaactgaaagcaattaaagcaccaaaattaattaaagaggtagctttttcaagagacagacctagtgaaattaaagagaggccaccaataatcaccacgttccaaataggcgtctttgttttagggtgaatatagccaaaaattctccgaggaagataaccatctttcccaattgcatagagaagtcttgatgcactcatatgtgagacaagtccagaagcaatagttgaagtcaaggccgctgctacaaaaatagattgaaaaagctggccgccaattttataagcaatttccgctgatgcaccttctaaatcatgaaacaaagaggctgaagggaaaaggagctgagcaaagtaagaaactgtgataaataaggcgcctcccgtacatgcaataatgagaatccctttaggaatggttttctcaggcttaagtgtttcttcggccatggtggttacagcatcaaatcctaaaaaagaaaagcataaaatagctgctccgtttaataacagagatatagaggccgattcacttataaacggtttaaatgatagctcttggcctcgagttgtagcacttaaaataataaagataatagcgactaaaatttgaaaagcaactaatagcgtacccaaagaaacggttaaatgaacgctaaaaatattcattatggtcatgatcacaacaaagctgataatccatacggcctttggaacacctggaaacagagagcttaggtaaatatttgtcaaaagtgcattgatcattggcagaaatagataatcaagaagagccgtccatcctaccaaaaaaccaatgcttggattcattacttgctgtgcgtatgtataagaggaaccagctccgggaaaagcttttaccatttttccataactaatggctgtaaataaaatagcaatcaacgtgaatgcataagcgcctgaaacatgtccatctgttgattcagttacaatgccaaatgtatcaaaaacggccataggtgccatgtagcctaagcctatcacgacgatatgccataattttagttgtttaagaagagaaggttcatgattcatatttgtcatcctttctgtgtataatcattctgcattatttattattatactatattattaggtttgtcatctttttttgaaaaagaagagaaaattgcgcgctaagagataaaaagcgtttaattgattactagataaagcaaaaaaatgctttttttcactttgatttttaccattgagtctagaaagtattttacataaaatgaaagaaagtaaaaaagcttcgtttagggtgatctacttgtaataaatacgaaaacaaatttttgaatgcggttacatttttgttggtatacaaagttaagaatgatggtaaaggagatgaaggaagtgattgctacaccctatataaacttggagataaacaaggaaccaggtgtgcatgtcgtattggatgaaacgaaaaaagatggtgtttattttattaaattaacggtcaagtcggttaaaaaaagaattcttccaaaaatgaaattaaaatggagcgttccattgttagatatccaactatataaatctttacaaactagtaagggcgatgtgagtgcctcttttgttcattgttttatgaataagaatggctctaaccgttacaccattgcatgttcagacatgcatcagcctattctgtgtgccactaattggaaagaaatgtgtctagatgtagaaatgactttatttagtgaaagcacttggtctcttcatagctatgaaactgaactgcgagtagacacaagaatggttgaaacagaagagttattcaaagatttagcgaaatggtttgagagaaaagagattaatctagcatctgcttttgagcatgcaacggcaatagatgaaaaaggaaatgtctcgttagatatttgatggtaaggagagggataaagtgggaatcttatttaatgaacgtacaaaggaatttcacctgcagggacgcgatgtaagttatatcttttcagtgttgagaaacgggcagcttggtcacttgtactatggaaaaaagcttaagcaccgttcatcttttcagcattttttgcgtgtagaaacaagaggagctagcgcttcggtatatgaaggagaactagcattttctcttgaaacaatcaaacaagagtatccttcttatggaacaacagatttcagagagccagcctatcaacttcttcaacaaaacggaagccgaatcacaaattttgaatacgataaccataaaatttacaaaggcaagaagccattaaacggcttacctgctacatatgtagaagaagagagtgaagccacgagtgtagaagttgaactgattgataaattgctcaatgcatcacttattttaacgtataccgtttacgaagaccgaaatattattacgcgtcacgcacgatttgagcatagaggagaagaaccagtcgatattttgcgtatcatgagcggcagcattgatttgcctacatcaaattatgagatggttcagctttccggtgcgtggattcgagaaagacacgtgaaaacacgaatgcttcagccaggtattcaaagtatttctagtgcgagaggtacaagcagcagtcagcaaaacccatttttaattttaaagaatccagctgcaactgaacacagtggagaagcgtatggttttagtcttgtatacagcggaaactttcttggacaagtggaagtagatcattatgatgtatcaagaataacgatcggcattcatccttttgattttcagtggcgactagaaaggggacaaacttttcaatcaccagaactagtactggcttattcaaatagcgggctaaacggccttagccaagagtatcatgagctttatcgcaagcgtcttgctagaggaaaatggcgggatttggagcgaccagttttaatcaataactgggaagcgacgtattttgattttaacgaagagaaaattgtacatattgccaaagaagcgcaaaagctaggcgttgaactttttgtattggatgacggctggttcggtaaacgtaacgatgatacaacttctcttggagattggtttgtagatgaaaataagcttccgggcggtatgaagtcattggctcaaaaagtaacggatttaggtatggactttgggttatggtttgaacctgaaatgatttcaaagcaaagcaacttgtatgaaaagcatccagattggttgattcatgtgccaaatcgtcatcagtctcatggacgaaatcaatacgtgcttgatttttcaagagaagaagtagtgaattatatctatgaacgaatggaagctattttaagtgaagcgcctatctcttatataaaatgggatatgaatcgaaatataacggagattggatctgtagggctgcccgcgaaccgtcagtttgaagtagtacatcgctatattttaggtgtgtatgacttgtatgagcgactaacaaggaagtttccggatattttatttgaatcatgtgcaagcgggggcgctagatttgatccgggaatgctttattatgctcctcaagcttggacgagtgataacacggacgcgattgaacgtctaaaaattcagtacggcacgtcttttgcctatccaatcagttcaatgggagcacacgtatcggccgtaccaaatcatcaagtacgcagagtaacaagtctagaaacaagaggagacgttgcgtattttggcgcatttggttatgagttagatgttacgctgatgacagaagatgaaaaagaaactgtaaaacaacaaattcagtattataaaaaacaccgatcccttattcaaaatggcatattctatcgtttaaaaagtccgtttgaacaagatggaaatgtgacgagctggatggttgtttcatccgatcaaaaacaggcaatcatcggttattatcaagtattgtctagaccaaatccttcttacgaacacattgagctaaaagggcttcatcctgattatgaatatacagtgatggaaacagatcaaacagcttatggagatgagctcatgtacgcaggtattgctctaactcatgagtatccgggtgttgaagcatacgctgaaaaatctggagactttgtatcggttatttacacactgcaagcacaataagcaaaaagccacttctatatcatagaagcggcttttttagttaactattatttatacagtgttgacataaaaggagaagtaatggtaacttttagttataattgttaactttatatttttttagtttactaaagtggaggggaatcgatggaaaccacaagtttaagaaattggaaagcacttgctcagtctattattaaagggaaagaaattacatataatgaagcgcttcaacttctttatgtaccggatgaagaagtgttagaggtcatgaatgccgcgtacttaattcgtcatcatcattatggaaaaaaagtaaagcttaatatgattattaatactaaatcgggtttatgcccagaagactgtggatattgttcgcagtcgatcgtatcagaagcgccgattgataagtatgcgtggttaacaaaagagaaaattatagaaggtgcttttgaagctcaaaaaagaaaagcaggtacatattgtatcgtggcatcaggccgccgccctacggataaagaagtagcgcacgtagtgggagcggtaaaagagatccgtcaaaagacagacttaaaaatctgtgcttgtctaggatttttaacagatgatcaagcacacgaactagtcgaggcgggggttcatcgctataatcataatttaaatactcacgctgataactatgacaatatttgttctacgcatggctatgaagatcgagttgatacggttactacatctaaaaaagcaggtttgtcaccttgttccggtgcgatttttggaatgggcgagacaaatgaacaagccgtggaattagcttttcaaattaaaaagttagatgcagattctattccatgcaactttcttgttgccgttccaggaacgcctctagaagacaaaaagacgttaaagccaatgcaatgcttaaagctgttagcgatgatgcgttttgtaaatccaacgaaagaaattcgaatttcaggaggcagagaagtcaatctcagatcacttcagccgcttggtttgtttgctgcaaactcaatttttgtaggtgactatttaacgactcaaggtcaagaacctacagctgactggggtctgattgaagatttaggatttgaaattgaagaatgtgcactgtaaagccgttgagaaatcaacggctttttgatttttaggcgatttacaggaactatacggtttttttacaaaactcaacagcttctttatatttccttcataaataaccattattataaaacatgtgaacgataagtgaatagttactaaggttatgaaattgagaaaccacaaaaaacaataggtctatatcaataccctatgcgttttttgtggttttttgtgaatgaaaggaaggcatcgttttgaataaggaagcagatttcttacaacagcttgggcaagaccgtttgattgcatccattaaaagcccgaaaaatttagaacaatttttagaaacagagatccaggccgcctttttattaacgggcaatattagtgtgattaaacactatgtagatttactcaaacagcataatcgaacggtttttttacacgttgaaaaaattccagggattagctatgaccgagaagggcttaaattccttgctaagtttgtaaaacctacaggtatcgtaaccactaaaagttcactcattaattacgcaaagcaagaaggactggttgctattcagcggctgtttctagtggatacagacgcggtagcacaagggttgaaaaccgttcaagatattaaaccggatgcattagaactaatgccaggattaattccggagatgatagagaaagtcgttaaaaaaacaagtatccctattattacaggtggactcattcaaaatgaaagccatatccaagctgctttaaaagcgggagctacggcagtttctacagggaaatcatggttgtggaaaaaatatgaatgatagagaaaggagcgtttttaatgaaaaaagtagagctagttaacattgggaagtcatacgatcaaaaaacaaatgttattcaagatattaacgtcacaattgaaccgggagagtttttcgtactagtaggtccttccggatgtgggaaaagtacaatgctgagaatgattgccggattagaagaagtcacgcagggagagctactaattggagatgtaaaagcaaataaactgcttccaagtcagcgcgatttgtcaatggtgtttcaaaactatgccttatatccgcatttgacagtggaacaaaatattctttttggcctgcatacaaagaaaatttcaaagcaagaacagcaaaagcgctgcagggaagcagcagagatgcttggtttaagtgaatatctaaagagaaagcctagacagctttcgggaggacagcgtcagcgtgtagcgcttgcacgtgctattgttactcattcgcctatttgcttgatggatgagccgttatcaaatttagatgcgaagctgcgcgcgaaaatgaggtcagaaattcgccagattcagcgtaagttaggtattacgatgatttatgtcacgcacgatcaaacagaggcgatgacgatggcggatcgaatgatgattttaaatggaggaaatattcaacaagttggacgtccgcttgatatttacaatgcaccaaagaacacgtttgtagcatcttttataggttctccccctatgaatttatcaaacgtttctatagaaaataacttactagtttttgaagatagaagagctatttctatgagtacaccacacagtaaccttaacggtaaaaaagaagttgtggttggagtgagacctgagcatatacagcttgccacaaacgataatacgagttttattgtggaagtagataatgtagaaattctaggcacggaaacactgcttacatttcatatgggtgacaagcagtggatggctaagtggaacggtcaatggactataaaggtgggggagcgagttcctatttttatcgatccaaaacacctgtttttatttgatggcgatacaggatcatgcttgcactacgaaccatcagcagaagatttaactgtaaagggggcattagtatgagtgctgttaccaaaacagcaaactcacctgtttctgttttagcaaacccaaaagaaaaaaaatcaatgcctactatcattgttggactagcttatttactgccatcattactgttatttagtgtatttcttttctacccaatgattaagacattatatttaagtctttttattacggacacacagggaaatcccttgaattttgtaggactgcaaaatttcttatatctatttacagatcctaatttcttacaaagtatgaaagctacttttctatttgtactctacacagtacctattggcttagttattgccttattcctagcgctaatcgcaaatgaaaagctaaaaggaattggttttttcagaacaatgttttcatctacgatgggaatgagcgtagcggcttcttctgtgatttggatgtttatgtataatccgacaatcggggttatcaataaagtattaaaccttgtagggattcacgacgtgcagtggttattagatcctaagtatgcattggttgctgtgtctatctcgacgatttggatgaacattgggtttacctttttaattttacttggcgggttgcaaaatattgatgaaaagctgtatgaaaacgcgcgtattgctggagttagctattggtatcagctccgtaaaattacgcttcctatgctttcgccaacgctgttttttattattacggtttcctttattaacgcgtttcaaacgtttggacaaattgacattttaacaaaaggcggacctacagattccacaaatgtcattgtttattcaatctacaaagatgcatttgtaaactacaatgttggctctgcaagtgctcaagctacaatattatttttctgtattctactggttaccgctcttcaattcaagcttggagaaaggaaggtacattatcaatgagcattacgagaaaatggacaacttatttgttactcattgcagctactttagtattgatgtttcctatcctatacgctttttccattagttttatgagtggagcggaagtgttagaagggaagatttggccgtcatctttttcatttgaaaactatcgggacgcttttgaaaaagttccgctgcttcattatttaattaacagttttgctgggtctatctttgtcatggccgggcagctgttagtttcaagtttggcagcttttgcatttgtatttattaaatttaaaggaagagatgctattttctttctctttatttctacgatgatgattccatgggaagcaacgatggttcctaactttttaacagcacaaaagctaggatggattaacaattatttaggattaacgattcctttttttgctttagcgtttgggacatttttgttgcgtcagcagtttaaaaccattccgaatgagttatatgaagcttctcaagttgcagggatcagccgctttcgtttcttttggaacgtcgtgctccctgtgtctaaaacaagtctagttacgcttggtgtatatagctttttaacaacatggaatatgtatttatggccactattagtgacaaatacagaggatgttcgtaccgttcagattggtttaaagcaaatgcaaacacaggagatttcaactgattggggagtggttatggccgctgtcattgttgtaatcttaccgacattattactattattcctaggtcaaaaacgtcttcaaaaaggattaacccaaggtgcaattaaataggagagtgaatgtgatgaaaaagatattggctatcgtaacggcatgcttgctagttattctaggtgcttgctcaaattcaactggttcttcggaagcgcaagaaacaaaaaaaacagcatcaggtaaaacagaagtcgtattttggcacgctatgagcggtgaccttgaaaaatcactcaataaaattgtcgatgagtacaacaaatctcaggacaaagtcgaagtaaagcctgttttccaaggaacgtatgaagaagcacaaacaaaatttaacacagtagcaggaacaaaggatgcaccggctattatgcaaacgttcgaagtgggaacaaaattcatgatagacagcggtaagattcagcctgttcaaaagtttatcgatcaagaccactatgatacttcacagtgggagaaaaacatttcaagctattaccaagtagatggaaagcaatactcaatgccgttcaactcttcaacacctgttcttgtttataataaagatgcctttaaaaaagcagggttagatcctgaaaatcctccaaaaacgtatgatgaattaaaggcggctgcaaagaaattaacagaaaaacaaggaaataaaacatcgcaatacggtttttcaattctaaattacggatggttctttgaagagctagttgcttctcagggcggcttgtatgtagatcacgaaaacggccgtaaaggtgatgctgagaaggcaggatttaatggaaaagaaggacaaaacgcatttaatttaatcaatgatatgtataaagaaggtacattctacaatgtaggacaaaactgggatgatatgcgcgcagcatttcaatctaaaaaaattgcaatgttcctggactcatcagcaggtattaaaacactagtagacaatgctccatttgatgtaggcgtatcttatattcctgtcccaaaagaagaggatcgccaaggagtagctattggcggagcatctttatggatgtctaaaggaatcagtgatgaaacatcaaaagcagcctgggacttcatgaaatatttagcaacaccagaagttcaagcaaaatggcacgtagaaagtggatactttgcagttaacccaaaagcgtatgaacaagatattgtgaaaaaagagtgggagaaatatccgcagttaaaagtaacggttgatcagcttcgtgaaacaaagcctactccagctacacaaggtgctttaatttctgtgtttcctgaatcgcgtcaaaaagtagtaacagggatggaaagcctatatcaaggagtaaagccaaaaaaagcgcttgatcaagcagcaaaagaaacaaatagagcattagaagtagccaatcaaaaataacgtatgattacgaagctcgtctttcaagttattttgaggacgagctttttacttagtgaatgactagttaggagagatagaggacaatgaatagttcaattgatctttatgcgcatcgcggctttagcggacgatatcctgaaaatacaatgattgcatttgaagaagctaggaaaatgcaagttgcaggtattgaattagatgtacaattaacaaaagacggggaaatagtagttattcacgatgaacgaattgacagaacgacgaatggaatggggtatgttcaagaattttcatacaaacagctgcgtttattcgatgctggcagttggtatgactctcgtttttctaaacaatggattccgacattagtagaagtgtttgagtggatgatggacaaaaagacaaaattaacggtgaatattgaattaaaaaatgaccgaatttactatccaaaacttgaagaaaaagttcttcgtctaatcgatgagtttgatttagaagatcaggttattttgtcatcttttaactatgatagtttggctaaagtgagatctctccattcatatataccaacaggttttttatttgaaggggtgagcgaagatacgattggaaaagcaaaatcgataggagcgcacctacactgtgatatgtcgtttgctctttctgcgtatgggaaaaaagcaaagcaagaaggattagacttgcgggtatatacgattaatgaaatggataattttttaaagctccagcaggtttcagtaaaagtcgtgatgacagattaccctaaccgtttttcctctaccatgttcaaaggatgacgtagaaagaagctgtgacaaaagtacttgatccacagtgaaaaacgaacccttgatcaacatgtttgattagtggttcgtttttttgttgtggtgaacgtgagtttcatctgtttcggtccttctagcagttgattggagggcaaggcgaagactcctgcggaaaaagcgcaagcaacgaggaggctcagccaccgcccgcggaaagcgaagtcttgcatggaaatcaactgcggtgtaacaagcggttcggctcatgcctcccatttgttcgtctttaggttggattaagtttgttatgtctcaatctcttttttttgaaaaaatattattttattctgaatagtataaaagttatgttgtgaaattgttttatagatgatatattgagaatagattataatgttccttatgaaagcgaatacatgttgcgtagctccgcaaacgttcatttgccggtccctagcatcgtctgttatctcttttaggaggaataaaaaatcatgtatgatcaagatactatctatattattggagatgccaaagctcctcaaagcaatccgattactaaaaagttcaatcagtattttttaggactggtagttgataaaacaaatggaaaaattattgatgtggaatgctcagcgacgattgagttgaccgttcgatttgttcaatcaatttttattggacgtcatataagtgatctcacccttacagacgacattaacagccgctacttcgggtcttcccaaaaagcgctggtggtagcgtttcatgatgcacagaaaaaatatcagcaaataacagctgctttgtctacatagacctagacgaaatccagcctgacgttttcaaacgttgggctggattttgttttgtataaaaatattttcgtggagatgaagggggaagaataaatgattcaagatggatttatgtatgtgagtgtgttaactgcctttgctgcgctcatggtagggattgaaaaaagatttaaagccaatcgattttttaaatttatcccgggtattgtacttatttatataggagctgctcttatgcaaacggcaggggtatttggggatagcgaatcaaatgtcgccatgtatacgggcgttaaaaatgcactgcttccggccatgctgatgcttatgctgttaaagtgtgatgttcgaagtgtaattaaacttggtccaagaatgctgggaggattcatcgttgcggtttttagcataatggtaggttttatcctcgtctatgccacctttaagaatttctatgtagaggacacgtggaaagcttttggtgctttatcaggaagttggaccggaggatcagctaacatggttgctctccaagggattttggatgttccagaaaatatatttggctacgctcttatgatggatacgattaactatgccgtatgggttatgtttatgttttggcttgtaccatttgcatctaaatttaataaatggacaaaagcagacgtcagctttattgagaatagtatagatgaagtcgcagcaacttctgaaagcgaaaaagaaggcccgcagtttcagcatcttctttatttacttggtctaggtttgttcgtttcagcattttctacgtttatcggagggcgtttgcctgaagtgggagcggttattaatgcaacgagctggacgattatgattgcttctgtggttggtctagtgcttgctgtaaccccagcggcaaaaattccaggtacgctcgatgtatcaaacgttatgttatacatcgttgtagcgttaattgcttcccaatcagatttttcaaatttagctcaggctcctatttacttagtatctggttttcttattatgttcgtgcacttagtgatcatgctgttgctagctaaactatttaaatatgatttatttacgctcggagtagcaagtttagctaatattggtggaatggcgtctgctccaatgcttgcagctgcctataaccgtgcactaattccggtaggagttattatggctctgatgggttccttcttaggtacttattttggtatgatgatcgccaaaattttaggggcgatctaagaataaaccaaaaatacgtatgaaagaatatttgtgctgaatcgaaaggaagcgattgaaatgataattaaagacataactgtaaagtatcaaaccgttccactgctcgttccgtttaaaacagcgcttcgaacagcaacagagatagacagcataagtgtagagattcagttagaaaacggaataaaaggaaaaggagcggcttcgccaacatatgttattacaggcgattctttagaaggcattcaagctgcacttcaaggacctattaaactagcgctaataggggaggatatacgtcagtttcaaaaactcttaaaaaaaattcaaagctgctgtattcacaattcaagtgctaaagcagctgctgatatcgctttgcatgatgcctatacaaagtttcttaatattcctttatatgctttcttgggcgataagcagcctatctctacgtgtatgacgataagtgttgatacacctgagaaaatggctgaagacgcacaaaaaagtgcagcggacggatttgacattttaaaagtaaaggtaggttcaattcctgagctagaccttgagcgtattaaacatattcgctctgtcattccggatcatgtaaaacttcgtttggatgcaaatcaagggtggactccaaaacaagcagtgcaattaattaataaaatggaaactttcaactttggtattgaattggtagaacaacctgtccctgctcatgattgggaagggttaaagtttgtgactgaacgagtaaacgtacccattatggcagatgagagtctattttcttccaaagatgcattaaggcttgtaagcgggcggtacgtggatcttttgaatattaagctaatgaagtgcggaggaattaatgaagcaagaaaaatcgcaagtattgctgaggcgaacggtgttgcatgtatgattggaagcatgatggaaccatcactttctgtgggagcagctgctcatctggcagccgctcatccgaatatcacgtattttgacttagatgctcctctttggctttcaactgaactggatgtgttaaagtacagcggtcaagagattttcttatcagatcttcctggaataggagaaatcaccgttcctatctcaaaataaaaggatagtaatatagtagaaggagagagacgatgaatataaagcgttggcttttaacggcaacaacagttattttagctacatttggggtcagtgcagttccttctgttcatgcttctgaagaaaaagaaactgcttatatagatgtcgcagcagctactctgtggacagcaccaaacatcttgcgggaagtggacgctccgtcagctactaatcctgtagatatgagaaagtggaccacatcgatgaatttgaaacagaagcagcagttatctagcgatgggatgcttgagacacaagcgttatatggaaacaaagtaacggttttagacgaacaaggagactgggtcaaagtagctgtagacggacagcctacttctcgaaatgaattaggatatcccggatggatgcctactaaacaattaatctatagcaaaaggtacgaacagtatgcaaagaagccttttgtaatggtgacggctccgactacttatttatatcattcgccttctttgaaaaagaaaggtattgaagttagctataatacgcgcttacctcttttggcaaagtcaaagagtgcatataaaatattaaaaccaaatggaaagacagcatggatttctacaaaagcaggaaaaatctacgcgtctcaaaaagatattcctgtaccaactggcacggagcttgttgaaagtggaaaggcatttttaaatcttccatatttatgggctggcatgagtggttttggatttgactgctctggatttacgtttacgatgtaccaatcccatggtattacgattccacgtgactcagggccacagtctcgagcagggaaaccagtagatatgaataaccttcaacctggagacttattgttctttgcctataaccaaggaaaaggaagcgtccaccatgtagcgatgtatgctggagatggcatgatgattcattcgccgaactccgagcggacagtagagattattcctttaaacacaaagggatatattgaagagtatgcaggtgcacgtcgttatttaccttaatcagtaagataagaaagaagctctttttgtgaagagcttctttcttaatatagattacatataggttacagatgaaaaattagaaaatttagtttatttatgtttaactacttctcggtaagggaagaaattaaacaagagaaaaaaacatttttcttcttgaaacatattgactttatatgcaaagtattatattattataaagcgtcgttgagacatactcttaacagcgaagctgaaaaaagaatttcaaaaagttgttgacattacgttgataacttgataagataataaagtcgcttaagagcggcggttgaactttgaaaactgaacaaagcgacaaacgtcaacgttaaattttattttttaattgagcaagtcaaacatttcttcggagagtttgatcctggctcaggatgaacgctggcggcgtgcctaatacatgcaagtcgagcgaactgattagaagcttgcttctatgacgttagcggcggacaagatgagatttcccatagcgcaagctagtaagatccctgaaagatgatcaggttgataggtcagaggtggaagcgtggcgacatgtgtagctgactgatactaatcgatcgaggacttaaccaaactttaaaagcgtaagctttactcagcgaactgttatctagttttgagagagcaatctcttgtctggtggcgatagcgaagaggtcacacccgttcccataccgaacacggaagttaagctctttagcgccaatggtagttgggactttgtccctgtgagagtaggacgttgccaggcatttttattatcgcggggtggagcagttcggtagctcgtcgggctcataacccgaaggtcgcaggttcaaatcctgtccccgcaaccaaattatcttttatacatacttgaatatatcattattatccttaggcatagcctaaggattttttgtttggctatatttataaacacttgtttaggttatgatataagatagtgatgcagattaatcaggaggttttttcatgttacaaagtaatattcaaacttatattgaaaaagaaatgaacgttcaaggtcaatctttatctctataccaggaagaaaaggaatatgcgttgcaaaaaaagttggtaccgcaaaacctgatgatagaagaaaaagaggaatctttacgttttaaagattcttatatcgaaagagtagataaagaaacggacgagctgatcgcagaagaatttcctctttcgtttttagatacgcccatttcttacttgaaagaacacagaagtgaatttctatatgtagaatcaaaatggttcgaatttattaagcttgagggatgttcttttgaagtggatgatgtgtttggcacatataaagtattaacggggctacatatgcaaaaaaaattcggttctttactaaaacaattttttgctaaagaatttaatgaaagtccgacaagcgtccaacttttatttaatgataaagatggattatgggatgtgaatattgaattagatgctataaaagagtttaatgaaaaaatgtcgataggtgaagttcttgttcttacatatcgttttttctttcatctagtggagtatgtagagaacgaaaaagcttaagaaatgatgattactttcactgtaaagcatagaacgtagtttctatgctttttttgatgagtaatacgtaatgaatgctaaatgaagctggaaatacatttacatctctatgtttttatggaatgataaagagtatctttacctatatgactgctataagtaaggaacaactatcaggaatctttctagttttttgagaaagtagctcacatattagctgttaatagcactcagagcaagaaagcttccgtaggatgaagtataatatatacatacaggaactatttttaactttataaaaaatgtctgctgacgtatgggattataaataaagaggggatgttcatgttattaagaaaaataaagtctgaagaattggcagaagtctatcaaatgggatatgccgcatggcctaaaggcagaacgtataaagagtatgtgagagataatcaaaaagaagaaacatatggaattcgatatgtatacgtaaatgaagaggatcaaattattggttcatttattttgcttcttttacaaactcctcgattaaagtttgctttgcatggtattggatccgttgttgtacaccagctttatcaacgaatggggtatggccgtgatatgcttgaagacttttttaaaaagatgaagatagagaagcgcagcgctatttttatgctgtatagcgatattcttcctgaatattatcatcagtttgggtttaaggagctcccttctcatttacaacgttatcctcaatccattgctatggtaaattgcagcgagtcacaatatgaatacttaagtaagcaatccatagaagacataccggcctatttttaaaaggtatgtcttttttatagtatttatcggcacaatcgtttacaattttatgtaagcgttctcttttttaggagatgaatgattttattcgtcctcataaccgtaggcaaatcgtgcagttaatataaattttattacataaaaccttgctatcatcttactaataactcttattcatttccataccataccgatatgtacgtttgctgctaagtataaccatatcaatataaggaggaagcaggaagatgaaacgattatttatagcagggatcacttttatactttttttatctttaggtgctgtatcttcttcagccgcaggaagttttacctctaaaacatataacggaaggacatacaaactgtatgtacctagcagttatcagggaggtgctgccttacctctagtagttatgctacatggctgtactcaagaccctgatcaatttgcagcaggaacacaaatgaatgaactggcggagacagagaagtttcttgttctttatccagaacaaccctcttctgctaattcaaataagtgttggaactggtttgatactgctcatcaatcaaggggaagcggtgaaccagcgttaattgctgaaatggtcaatcaaataaaaagcagttattcaatagatgccaaccaagtctttgttggagggctatctgctggtgcagctatgagtgttattatgggagctacttatccagacatatttgcggctatcagcgttggggctggcttagaatataaagcagcgactaatgtgacaggtgcttatacagcaatgagcagtggaggtcctaatcctatccaacaaggagatttagcctattcagccatgggagatcataaacgagtggttccagttattttgtttcatgggacagctgactacactgttgcgcctataaatgcgcatcaaatattatcgcaatgggctcaaacaaatgatagagcgtctgatgggctggataataacaatattgatgatacggcagatcaaactgcaacaggtacagtatctggtggaagaagctatacgcaatatatttacaaagatacagcaggaaaaacagtaatggaaaagtatatgatagaaggaatgggacatgcttggtcagggggaagtacatccggttcttatacagatcctaaaggaccaaatgcaactaaattaagctggaacttttttaaaagccatccgaaaaatggcgatgctcctaatccaggagatatatccccaccggttacagctgcttcaccagcgggaggaacgtatggaagttctgtttctgttacattatcaaccaatgaacctgccaccacttactatacattagatggaagcataccaactgttaattctctaaagtactctgagcctattaccatcaactctaacaaaacagtaaagttttttagtgtagacgcagcgggtaaccaagaggaagtaaagacggaagtttatcaaatttctggaacttcagagaaatcttcagtattttcttcacttgctgctgaagatggatttatcggaaacttatcagctgacggtatgagtagttctattcataaaattggggataaaggaatgtacaataccgacacataccgaaccattttatcttttgacacgggttctttacctgatgatgcaatcattacggatgtatctttaaaaatttatcgcaaatcttcaactggtaatatttcatctttgaaaggcgatattaaaagcggtgtatttggaactagcagtgctttagaacaaatagattatcaggcttcaccatctatttcagcgggcttccaaatgtcagtgcctcccctcaataatggatatacaactattcaacttccttcctcactttggggatatatgaataggaccggcaaaactcaatttcgcttgtcaagctcaggtccagcggaccttttaagtgatgtagttgaaatttatgggggcgacaatcctgcatgtgctccaactttaactgtttcatataagtaaaaaaaccttctaaaagcagttagcttttagaaggtttttttgctgataagttacttttatcaccgaatacaactccaactttttatagagttttcttcaaattttaacatgattttgatgaaatttaatcattattcaaaaatgaattgtcagaaatattacaagaaaatgtttaaaattaattaaatccgtaataaaagtaaaatattcctgtaatggaagtgaaatgaacaggtggtatcattcagtcattgagtaaataaggaggtattcggaaaatgaagaaatttgtatttactctagggacaacggcaattctttcagcaggatttgtaggtgcagcatctgcctctacaagcggaacgtatgaagtacaaaaaggtgacactttatggaaaatcgctcaaaatcataatgtgagcgtagacgagctaaaagatgctaataacttaacatcaacactaatttatccaaatcagacactaaacttatctagcataaaagaaatcgtacatactgtaaaacgtggtgacactttgtggtcaatcggtcaacattatggcgtaacagtagaagaaattaaagaatggaacggtttaacatcagacttagttttccctggagaacaatttaaaattaaaacggcacaagcagctcaatctcaaacagctagtgcgccagtagcaaaggcagctccacaagcgcagcagtctcaaacggcacaagctcagcaagaacaagcagcacaagaacaaacgcaaaaagaacaagagcaagctcaagcagcacaagcacaggtagcacaagagcaagcacaaaaagaacaagagcaagctcaagcagcacaagcacaggcagcacaagagcaagcacaaaaagaacaagagcaagctcaagcagcagcacaagcacaggcagcgcaagagcaagcacaaaaagaacaagagcaagctcaagcagcagcacaagagcaagcacaaaaagaacaagcagctcagcaacagcaacagcaacaagcagctcaacagcaacaacagcagtctcaacagcaagctagcggcaagtctatgactgttgaagcaacagcttatacagctaactgtgctggatgcagtggtacaacagctactggagtaaatttaaaatcaaatccaaatcaacgagtaattgcggttgatcctagcgttattccattaggttcaaaagtatacgttgaaggttatggtcaagctgtagcagcagatacaggtggcgcaattaaaggaaatcgaattgatgtattcgtttcttcagatagtgctgcacaagactggggcagaagatcagttaaaattacagttatcgactaatactagtcttatagaatagaagtaaagagagatgtcttttaggagacatctcttttttatgcttaaaatgaacgtttgaaaaaattaggtccgggcatactaaaatttataataggaattagtttgttatattagtaattatttcttgatttatatacaatgtttgagtgtcctaaaaagctgaaaagatgtcaggagtatagaaatatgaaactttataaaaaaatgcctttactaatagtgctgggtgttatcgcaggattctcgtatctaggtcatcagggattatttcagcacgatgatcatttgaatacgtctgatcataatcctttatcttcttctaaacagaagcagaatagtatagaaattgtagggaacccagaatccattggtgtgttagtaaacaagcaaaatcttcttcctgatcactatgaacccaatgaccttgtatacccagacgttcggtttatatttaaagaaaaaattgaaaagcgccaaatgcgtacagaagcagcaaaagcattagaaaggatgttttcagctgctgaacgagaaggaatttacctagccggtgtttctgcctatcgttctcaaagccgtcaagaatctctttatcaagcgtatataaaacaagatggagaagcggcagctaatcattacagtgctcatccaggcagcagtgaacatcaaactggtttaagtatagatgtctcaagtagcaccggtaagtgtgcggctcaagattgttttaaagatactcctgaagccaaatggattgaagcaaattcatataaatacggatacattgttcgctatccagaaggaaagcagcagattacaggttataaatatgagccgtggcatatacgatttgtcggaaaagaactcgcctctaaggtgtctaagaaaggaattacgttagaagaatattataatgactacatgcaagttgataatctggttcaataaaaaagaagagttatataaactcttctttttttgtattgctgaaatatactcttactttaaaagggggaacgagggaaagatgtagagatgaagcacgggatgatatatcctatgccttactagtaaaagagttaacgtttataaattataatgaattttgtgataaagaatattcatgttcgttttcatttcccttcacatattctacaaaaaagggaggtgaaagaaaatgagtttttacggaggttatggttatgggtacggatacggatcaagtcacggaagtagctttgcgctaatcgttgtgctatttattttactaattatcatcggtgcttcatgggcagggcactattaataaggtgtccataaataaactcccttgaaataattcaagggagttatctatttttatctataagtaggtaactgtaagtacgcagtgcttacatatcctttaaaaccgttgtattctacaaaagcccaatcaaatgaaagctttttatcttttgagtagccccaagctaagaagctgaggctttttcctttaggaatagttgttacaactttgttgcttgtgctaggccctgtgcgtaaattaaggttagcagttgtatgaacagtagtagggactttcattaaataggaagtactgatatatccggtgccgccaattattttaatggcagcccagtctgcatttacaaacttgactacttcaatttgatctttttttcttaatgtatcaagaatctttccctgagtgctaggttttgaacgtatattgagtacgtttgcggtcacttcatatacgctgaacggtgcgtttattttttctgctgcacttgctgtttgctcgtgagtgaatggcagtgttccagatagagatgaaaaagtaaagcccgctgctaatgctaaaaccgatatagattttgtaattgtcttcatacaaatatccaactccttagtgaaatagataataacttttctataacactaagaataagggttacttgtttctaagttgttaccaacatatatcccagttgtaaatttataaaaggtctgtaaaaaagtttatttcaccgaccttttaatagctttattgttactcctcctcgcgatcttccgttgatttgtaaaaagaaaaatatacaaaaacagataatactgttccataaatgctccacaaagctaaagcgaaaataaattctttctgcaggcaataaataatggttaaagcaactagtgcaataaaacttatcaaaatggtctttttcataagcaccccgcctatttagtttgattactctatatgctttttgatcttgcttttaccctataattattcgactattgtgctaaagatgaaaggaaaaagttaaataaagccgaacttataataaaaagaagaatgcagggggcgttttatgttagaacaacatgtgttagaagatataaaaaagctacagtctatttgcgaacaagaagagcacatagagctgaagctgaattttgatatgttacgaagtcgaaaacaaaatgaagttaacgatttttttcattatgaagataatcagcttgttgggtttattggtctttatgggtttgggaatacagtagaaatatgcggaatggtcgctcctagctatcgccgaaaaaggattttttcaaagctgttttctcaagctttacatatatgtaagaagcgtgggtatacagagattttattaaatgctcctggcgattcggtttcaggcagggagttcttaaagcaaattccatgttcatttactttttcagaatatcaaatgaagtggacaaaaaaagaattggaagatgataatccctttgttacacttcgctcttcccaatcagataccgatatgaaaatggaaatgcaagttgatgtggaatgctttggtatgtctttaacagaagcagctgcttattatgaacaaacgaaaacgaaagaacagcaaaaccattttattgtagagtacaatagtcaagcggttggaaagttaagggtatcttataataaaagcgaagcatggatttatggatttggtattttaccttcttatcaaaaattgggaataggaaaagctgctttaaaacaagttgttttaaagcagcttcggctaggatatgatatatttcttgaggttgaagcgaaaaacaaacgcgctttgcaactctacgaaacatgcggtttcaattcatatcacgtgcaagattattacgtatacaacttgtagataaaaaacacggaaatcttagattttcgtgttttttatttatatattagatgatatgtgcttttttgagtaaataatgagaaagtagagaaaaagtgatatgcccgttgatagaaacagggaaggccatacaaacatgataggagcgctgcaaacaaggatacacgtaagaatacctccaataaatgcttttctaaacaattgataagccgtataccccagactaatactgataaatacattgatgaggctaagaaaaataaaaggaaaaaacaaattatttcctcctttttttaaatacaccataaaaagaaatattttacatttttagtatagcaaaaaataaaaaaaacaataaaatttggatactaaagatgaaaaaggaagcgatctgtgttatgtatagtaaagtgaatgaaagcgttaaaaacggaaatgagttaataaagcaatgcagtagaaagaaaggagtaaacgaatggaatttgcccatatctttacactaagtgtatctgttgtaacagctattaatgttttattagccggtattcttattttcatcgaacgaagagatataggatctacatgggcgtggcttcttattttattttttataccgattgtcggctttattgtatatctattctttggaagacagctaaaacagaagaacttttataagttatcatctgatgagcgggaatatttaagatcttcagtagatgaacaattaaaagaacttaaagctacccatgaatatcgaaatgatttattgattcaacataataaactgctgttcaccaatttaaattcttctaagtcactcgtgcgcactgacaatgaaattgatatctttagtgatggtaatcagaaatttgatgcattgtttgaggacattcgaaatgctaaaaaagaaattaatattcaatattatattattcaacgagataatcttgggaaaaaattaagagatgagctaacaaaaaaagcaaaagaaggcataaaagttcgtgttctttatgatgaagtaggatctagaaaaatgacgccatcattttttaaggagcttatttcatatggcggcgaagcacaggcatttttcccttcaattcttcgcttaattaattttcggattaacaatcgaaatcatcgaaagctttgtattattgatggtgaagtagcatacataggaggatttaacgtaggagatgaatatttagggttagatccaaaaatgggttattggagagacactcattttcgcattaaaggagagtcagtgaacgatattcaagggaggttcattttagattggcatcaagcaacaaaacaaccaattgaactggaacaatttttgcatcgtacagaaactcattctggaacggttcctgtacaaattgtagcaagcgggccaaactcgactactcagcatctaaaaaacatgtatatctcattgattatgtcggccaaagaaagtgtgtaccttcaaacgccttactttattccagacgcaagctttatggatgcttgtaaaattgctttattatctggagtagagattcatattatgattccaaacaaacccgatcatccttttgtttattgggctacgtggtctcacgtaggcgaactgctgacgtatggtgcacatatttatctctatgaaaaaggctttttgcatgctaagacgattgtagtagataatgaagtgtcttctgtaggcacgacgaatattgatccacgaagtttcagtcttaattttgaagtgaatgcagttgtatatgaccagcctattgccaaaaagttgcagaacctgtttcttgaagatgtgcaatacagttcaaaattaacgctcgaacgatataaagagcgctctcttcttataaaatttaaagaagcggtatctcgcttactgtcaccaattttataatacaaatcattgatatcatgaagcagacttgaatttttagattcaggtctgttattttattggtttctccttgtaaggagagcgagagataaaattaaaaagttttaccaaaaaatccaagggtattaatactataacaagctaaaaaatgataatacctaggaggaatagaaaatgacaaaaaatgtagtaggtacgtatgattcagaggcagcggttattacagcgattcgaaatttaaaaacacagggatatccggacagtgcactttctgtcttgacaaacagtggtctgcgtcatgaaaatacagaagcgattgagcattctgcaggaattgatgtgcaaacagttgatacagatgaacactcaaagcaccatcaatcctttatggagaaaataaaaaatgcttttacgccgtctgaagaaaaaatggatcaagatgttaatcgaatcgaaaatcaattaaccgaatatggtgtacctgctgcagaagcttcctcatatgtatctgatcttaaaaaaggaaaagttttgctgatggtagacgcagttgagcatgataaacacaattcagctctaggaaaaacagtgacacctgctgaaaaatcagctgacccaatgaatgaaaaaatgttatacggcaatcacgaaaataaaataaggtaatgttgaagtaaccaaatgcgataataaaagactgcgttcttaaataaaagctagttaacgaaaggaaggggaccgatgagaaatctagaaaaaacggaatatgaacttgactatttaaaacagcagcaagaagttaatcaagagctcatcaaagtttcacagtctcttgttgctacgttaaaacagtatgaagaagaaccagagaatacggaagtgttagctgttcttgctgacttagaaggtcagcaagagcagctaaaagcaaagaccgaaaagatatctaaagagcttgcacatttatagagtgagatgaaagaagttcctataaaagggacttctttttatgttttatcataaacaatctattgtgagagaaagagaaccttatataacggaacgtaaacgttatggagaggttttgttttagatacatatagagaagaagaaacgcgataagagattatgtaaaaatgggaaaaggaagaacggtcattcgctcttcctccagccgtattgcttatgacagtgatttagaaacgtccgccgccaagttgctgttcagccatttgcacaagacgttttgtgatttcgccgcctactgagccgtttgcgcgtgcagttgtgtcaggaccaagagttacgccaaattcgctagcgatctcatatttcatttgatcgattgcttgttgagtaccgtgtactgctaattcgttgctgctcttatttctgctgtttgccatcataatcaactccttttataaggttaagattatgatttgattaatagatagtttttatacataaaataaaaaaattttttcaaggacttatagaatatgcttattggaataaagaaccaaaagtttccgctaggtaacggaaaataattatgtgtagaaagagagagggggcaagtaaaatagaacacaagaaagtaagcggttacaaaacgattaagatagaaggagaatgttaatattcctattctatttaaaaggaggagatttgctatgtatcaaaggttaaaaaagtctgtactattggctattacattgagtttagcaattggcattgtactctcttatgagaaagcagcgctggcgaagcagacgcacgaaaaagctacatcctatcgtacagtgacagagatttatgactggggagcggcgatcacaaaaattattattgacttaggtgaacctgttccaaccaattcacttacaaaagaaacgtttaaggtgcatgtggctcgaagtgatagtcgattagaaccgtctttattggaacaaggagatcgtacagtaaaaaaagcctatgtatctgataaagatggacaaccagccgtacatactggaaaatatgcagttttagaaatggaagttggaccagctgtttcattaggagcaccactaaattacgatgaatatggtacagagttaaatgcatggatagacagtcaatataccattactcagcaaaaagacataataacaaataaaggaaagttgtcagggcttgtagtgaaacagtttgcaggagagaaaaaagaactcgtagatgattttacaattaaaaaaggtatatatcaaaatatagaattagcatacgcaagtcatgcgccggcaaaggataagaaaaagaacccattaatcatttggctacatggtggaggagagggaggaacagatgcaacaattcccttatctgccaataaagctgttagttttatcacaaaagaaactcaggcttattttgaaggtgcctacgttttagtaccgcaagcgccaacaaaatggatggatggttatacgggtaaagcggatggaacttctatttataaagaatcactgatggccttaattgaagaatatgtttctaaaaaccctgatattgatcccaatagaatctatatcggaggagcatctaacggcggatatatgactatgcttatgattcgtgattatccaaaatactttgcagcagcatttccagtatgtgaaggactaaatgatagattaattacgaatcaagatattgaaaagatgaaacaaacacctatttggttcgtagccgccaagaatgatacggtccttccgccaacaattaacactcttccaacttatgaacgtttggtgaaaagccattcaaataatgtttatttatcactatttgaggatgtccatgacaccacaggtttgtataaaaataatgatggttcgccctatcagtataacgggcattcatcttggatatatctgtataataatgaacccaacgctaaaataaacggaagcacaacaagcataatggaatggataagcaaacaatcgttgaaaaattaatcattttaaaaaaaagctgttgcacattgaacagcttttttatttctcttttaaaacgaaagattgtatctaaaataaacgattgaatactttcgtgataaaataaggaaagagatcaagaagaaaggaacagtgaaagtgaaaccaaccatttacgatgttgcgaaaaaagcaggggtatcaatagccactgtatccaaagtaatcaatcaaacaggccgtattagtgaaaaaacgataaaaaaagtgaatgaagtaatgatggaattagattatcagcctagcagtgtggcagcggcgttaacaggaaaaaagacgtacacaatcggtgttctagttcctgatatctcgaatcctttttttgcagaggtagcaagagcttttgaaaatagtgctagagcagcgggatacacgctttttttatgcagtacagatcatcaaactgcgcgcgagcatgaatatatagatcttttatttaaaaaacaagtagatggaatcattatcgcaaccgaactaaatgatacgaagctcgtaaagaagatcgtgaagcatgatgtaccgcttgtattgttttcagttgaccatccttctatctcaacgcatgtagtgacaattgataacgttcgcggaggatatatcgcaggtacgtatttaatagaaaaaggtcatcaatcggtaacgattatgactgaaaaagatagaaaaagcagtgagggacgattagagggatttaaacaagcgctcacagaagcaaatttatcactagaaaatcaatccattatcagctgttattcaacagtagaagatagcaggagagcaagtaaacagctgctttccttgcctaataggccaacagcagtctttgcatgtacagatctgattggggtatcgctcataaacgaggcaagaaagcaggggctttcgatccccggagatctatcggtaattggatttgataatacgatttatgccgatattgctgagcccggtttgacaacgattgaacaacccatttctcagatggctactagtacgtttgaacagctgttaaagtctatgaaaaaagaagagcatgcgaaacagcgagtaacgattattcccgaactagtagaacgtgcgtcggtaaaaaagttataaaatagagaaggtaaaaaagctgcaggtgttgagacacctgcagctttttcttcttaagcatatttatagagagaccggacttttgacttcgtttattgtttcgcctttaatagttgtctctgttggaatcgtaaggaaaccagttagaaaagcaccaaagaagtataggcaagcaaagatccaaattacgccgctcgtgcccaaaagaccaataaaaacggtcacaattaaaggacctacaaaagcagaaagtccagatcctaagttcaacacagacattgcagctcctttattctccggagctaaagaaggcactaacgctgtaagagggacataacctgctagtgttgccccgtaacagcatgcgacaatcatcattacccaataattatgtccgacgaattgcggtacatagtagagagcaagtgttacaattccgcatccaactccgccaaaccatttgattgtatttacccagccaaacttatctccaacaataccaaaaataatattaaaagccatattcacaaaaaacaatgtaccccagatttgcaaccattcactcatcgtaaaatcatgtttcatcatatatgttggcaagaaaacaacaaatccaaattgagcagcagagttaataatctttacgatgccgccgattcctactttagggttctcaaatgcaattgtaatccctttcattaattcttttgttttattatcgtttactttttgtacggtaaacttgtctttattcataataattgaaaagattccaccgatcaaaacaaaaagtaaaccactccataaggtagcgatttctccaatttttggaaccatataacttgagtaaaaggctccgattacgcttaatccgagctggaaaacaaaccaaaaccagcctactgcttttgaaagcatttcctggggcgtgcggtaagacacccagaccaagaatgagtaagcaaataaagggtaaccaaaccctctaagagcataacaaattagtataattgtgtaattcataatatgaagtcctaaacctataaatccaattgaaccaataataaaggagatcaagccgaatgccattgcttttctaggaccccacagttgaaccaatacgccggagaaccaggaagaaacggagaccgtaatgccgtaaacagtaaacagtaaagcagcatgttcaatggttaaacctcgttctacaagataaggagataaccatccttgttctaaaccatcgccaatcataaaaacaataatacctatgtatccccacgttaaatgagaagggatgccaatcctgtctaaagccgtttttctggaaataaattcattcattttccacaccaccagatcgattattttgtgtaaaacatcaaactaatttggttaagcgcttaatctatttgataaaaagtatacgcttacattttttgaacgtcaattaaaattttaaatatatataattttcaattaaattattttaatcataaaaatattagtatgtaaggcaataattactgaattcatgataaaaatacttaaatattgagaatttatttagtttcatcgatgaatagataaaaaataaaaatagttttttatagtatgaatttagattgctaaaaaataaatattctaaataatctataaaaactgtttgcatttcagaaaacgttatgtataattggaatcaggaaagcgcttaacctatatagaggtttgagcgaatgttttcttaacttttaattaaaggggaaaataagatggggattcttacaattggaataattggtgctggacgcatagggaaattacacgttgataatttaaaattaatgccgcaaataaaaattaaagcggtttcagatgtggtagtagaccatttacatgaatgggctacaagtaaagaaatttcgacgttaacaacaaattatcaagatttattagctgatccagaaattgatgccgttttcatttgttcgccaacgaatacgcacgcatcgattattaaagaagcagctcgagcgaaaaagcatattttctgtgaaaagcccgttagtttttcagtagaagaaacaatccaagcgttagaagtagtaaaagaacatggcgtgcagcttcaagttggctttaaccgacgctttgatcccaactttaaaaaagtgcatgatcttgtacagcaaggagaagtaggacagccgcacattttaaaaatcacctccagagatcctcagcctccgagtcctgaatacgtccgcgcttcaggaggattgttcatggatatgatgattcatgattttgatatggctcgttatgtaatggacagtgaagtaatcgaagtattggcttacggcacgacgctcatcgatcctgctattgaagaagcaggggatatagatacggcaattgtctcattaaaatttgcaaatggagctttaggtgtaatcgataacagtcgtcaagctgtctacggttacgatcagcgccttgaagtttttggtgaaaaaggtgcagctgctgctgacaattgccgtcctactacagtagaaatatcaacaggcgacagtgtagttaaagagaagccgctgtatttctttcttgagcgctatacacaagcttacatagcggaagtgacacaatttgcaagagcaattatggaaaaacaaagcgttatttgtacagggaacgatgggttacaagcagaacgaattgctaaagcagcaaaagaatctttactatccgggcagccagtgaagattgaacataaaaaatacgcagtgaattaatgatagaaatgtgggctgaaagagaatatttgctcttttcgcctttttaggaaagcgcttaactaaggaggaataaagatgaatccgcttgtttttaaagaaaaccgtgggttagatttcatcgctgttggccgtttgtgtattgatttaaatgcaaatgaaacacagcgtccaatggaagagactaaaacatttactaaatatgtaggaggctctccggctaatattgcgattggagcagcaaggctaggcttaaaaaccggttttatcggaaaagtatcagatgatcaaatgggacgcttcattacggattatctgcaaaaaaataagattaatacagatagcattgttgttgataaaacgggggcggtaacggggcttgcttttacggaaatcaagagccctacagattgcagcatcttaatgtatcgtgataacgtagcggatttaaagctaagtcctacagaagtatccgaagaatatatcaaacagtcaaaggcacttttaatatctggaacggctcttgcgcaaagtccttctcgtgaagcagtgtttttagcactagaacacgcacgcaagcatgaagttgtagtgttttttgatatcgactatcggccatatacatgggaatcggaagctgaaacggcagtctattttaatttagccgctgaaaaatcagatgtaattattggtacgcgagaagagtttgacatgatggaaaaacttttaaattataaagaatctaatgatcaagtaacagcagagcgctggttttctcaccatgctcaaatcgtcgtgattaagcacggtggagaagggtctatttcctatacaagagatggtaagtctcaccgcggaggaatatttaaaacaaaagttctgaaaacgtttggcgctggtgattcatatgcttcagcctttatttacggattgatgcaagggctggaaattccacaggcaatgcgattggggggtgcctccgcttcgattgtaatttcaaaacacagctgttcagatgctatgccgacaagggttgagctcttcaactttatggagacagcaacagaagttttgcaggaagcttaataaaaaaagggaaaatcttgagagattaaagaaatagcagcttattaaaatgaggtaaagggagagatattctatgacacagacagcagtaaaaacagtaaaaaactatattggtggacaatggattgaatcagctacatcaaaaacggaacctgtgtataacccagcgacaggtgaattaatcgcccaggtacctctttctacaaaagaagacgtagatcaagcggtgcaagcagcaaatgaagcgttcaaagggtgggcaaaaacagctgtgcctaaacgtgcacggattttattcaagtatcagcagctattggtagataactgggatgaattagcaaagttagtgacagttgaaaacggaaaaagctttagcgaagcgcgaggtgaagtgcagcgcggaattgaatgcgtagagtttgcggcgggtgctcctacgttaatgatgggtaaacagcttcctgacatcgcaacagacattgagtctggcatgtaccgctatccaattggtgtaattgggggaattacaccgttcaattttccaatgatggttccttgctggatgttcccgcttgcgattgcttgcggcaatacatttgtgttaaagccgtccgagcgtacaccgcttttagctgcaaggttagctgagctgtttgaagaagctggtttgccaaaaggcgtgctaaacattgtaaacggcgcgcatgatgtggtaaacggtcttcttgaacataagttagtgaaagctatttcgtttgtaggttcccagcctgtagctgagtacgtgtacaaaaaaggtacagaaaacttaaagcgtgttcaagctttagccggtgctaaaaaccattcaattgtattaaaggatgcagatttgaacgtagcaacaaaacaaattatcggagccgcttttggttcagcaggtgaacgttgtatggcagcatctgttgttactgtacaagaagaaattgcggatcagctaattgaaagattagtagaggaagcaaatgatattgtaattggcgacggcttagaagaaaacgtcttcttaggaccagttattcgtgaaaatcataaagagcgtacgctcagctatattgaatcaggcgtgcaagaaggagcagagctaattcgtgacggtcgtactgatgcagcagtaaatggcaatggctactttgtaggaccaacgatttttgatcatgttacgcaagaaatgaaaatttggcaagatgaaatttttgcacctgtgctgtccattgtacgtgtgaaaacattagaagaagctattgaagtagctaataactctcgatttgcaaacggtgcttgtatttatacagatagcggcgcaagtgtacgtgagttccgtgaaaatattgaatctggtatgttaggagtaaatgtaggggtgccggcacctatggcattcttcccattctctggctggaaagactctttttatggtgatcttcatgcaaatggcacggacggcgtggagttttatacaagaaagaaaatggtaacaacgcgctggtaagtgattcattaaaaatcgcatctcatttaaaaaggaagtatcaggaattaaagatattccttatgcttccttttttaaaattgcaatctagtactagaagggagaaagaagcatggaaacagttagaatgacgacggcacaagcattagtgaagtttttaaatcagcagtatgttgaatttgatggaaagcagcatcagtttatcaaagggatttttacaattttcgggcacggaaatgtggtaggtcttgggcaagctttggaagaagacccaggacatctagatgtatatcaaggacgtaatgaacaaggaatggccaatgcagcgatggcttttgcaaaacaaaaacatcgaaagcagattatggcttgcacatcttcagtggggccaggttcagcaaatatggttacaacggcagccactgcttcagctaataatattccagttttgctgcttcctggtgatgtatttgcaactagacagccagatcccgttttgcagcaaattgaacagtcatatgatttatctatttctacaaacgatgcttttcgaccagtgagtaagtactgggatcgcgtaagccgccctgaacaattgatgacagctatgattaatgcgatacgtgtattaacgaatccagcagatacgggagctgtaactatttgtttgcctcaagatgtgcagggagaagcatgggattttccagcttatttcttccaaaagcgcgttcaccgcattgagcgccgccttccgactagggacagtctagcagatgcaattcaattaatgaaaacaaagaaaaagccaatcatcatttgtggaggaggcgttcggtattcagaagctgcaaaagagttaaaacaatttgctagtgagttccatattccatttggagaaactcaagcagggaaaagtgccgttgaaagtgactatcgctataatctgggcggaataggtgtaacagggaactcagctgctaatacaatcgctaaagaagcagatttagtaattggagtaggcacacgatttactgattttacaacagcatctaaacagctttttcaacatcccaacgtgcaatttcttaccattaacacgtctgaatttcatgcaaataaacttgatgctgtgaaacttgtagctgatgcaaaagaagggttgcttgctcttatgaaagagctaaaatcaattggctatcagtctggttataccacagaaattgcaaatgctaaagacgcatgggaaacagaattagagcgtctgcatagcatacgttttactggtgcagattttgttccagaaatacaaggtcatttagatgaaagcttagctgaatatgtagaatcacttggtactcaattaacgcaaaccgaagtaattggagaggtaaataagctccttgatgacaactccgtcattattggtgcagcaggaagtcttccaggcgacttacagagaatgtggaagtctactaaacctaatacctatcatatggaatatggatattcatgtatgggatatgaagtatcaggcgcacttggagttaagctggcagaaccagctaaagaagtgtatgcgatggttggagatggaagctatcaaatgcttcattcagagcttattacaagccttcaagaaagaaaaaaaataaacattttactgtttgataactcgggcttcgggtgcattaataacctgcaaatgtcaaatggtatggggagctttggaacagagtttcgttatcgaaacgatgaaacaggaaaactaaacggaaacgtgatgaaaattgattttgcagccagcgccgcaggctacggtgtaaaaacgtatcgcgtgagttctcttgaagaattaaaaacggcgatagaagatgcacaaaaacaagaggtttctacgctaattgatattaaagtgctgccaaaaactatgacgaacggttatgaatcatggtggcatgtaggagtagcagaggtatctaaaaatcagcatgtacaggaagcttatgaagataagatgaaaaaccttgaaatggcaagagtttattaaggagcaggagaaaatgaggttgttgaagagaaacattcgataaatataaaagaggttttaatttcatataagggagaggaagagatgttcaaggaaaatacggtcaaactggggattgctccaattgcttggacaaatgatgatatgcctgaactgggagctgaaaatacattcgaacagtgtatcagtgagatggctttaaccggttttagaggaagtgaggttggaaacaaatatccgcgaaatgtttcaatcttaaaaaaggcattatcgcttcggaatttggaaattgcaagcgcctggtttagtacatttttaacaacaaagccgctggaagaaacggtaacgccatttattgaacatcgcgattttttatacgaaatgggagcaaaagtaattgttgtgtctgaacaagggcacagcattcaagggctgatggatgttcctttatttaaagaaaagcctgtgttcacgccaacagagtggagcagacttgcagaaggcctgcaccatcttgggaaactggcacaagaaaaagatatgcatattgtctatcatcaccatatgggaacaggtgtacaaacaacagaagaaattgagcagctaatggagcttaccaatccggagcttgtttcgctgctatttgataccggtcatcttgtcttttcaggagaagaacctctttatatcctaaaaaaatatctgcaccgtattaagcatgttcatttaaaggatattcgtcaagaagtagttgatcgagtcaaagaacaggacttaagcttcttgcaagcggtaaaagaaggagcctttactgttccaggtgacggagctattgaatttgatgaagtatttactacgcttgccacttcggattataacggatggtttgtcgtagaagcagaacaggatccagctcttgctaatccttttgaatatgcgttaaaagcaagaaactttattaaagaaaaaagcggtctttaatttccattgtaaaagattttacgccttttatgtatttatgaaaggaaaggaggagaggaaatgaagccaaccatttatagtgtggctgaagaagcaggtgtatcaatttctaccgtatcaaaagtcatcaatcaaaccggtcatattagtgaaagaacaagacaaaaagtaattgaggttatggcgcagttgaattaccatccaagcgtcgtagcatctgctttaacaggaaaacccactaaaacgattgggcttctcgtacctgacatctccaaccctttttttgccgatttggcaagaagcatagaagaccgaagtcatgagcgaggtttccatgttgtaatgtgcaataccgataacgatgcggaaaaagagaaaaagtatctgtcgctgttaatacgtcagagaatcgacggtttaattgtagcttctgcttttcgcaatgctaatcttttaaaaaatatgcttaagcaagatataccgattagcgttattgcttcagaaattcctcacatatccgttaatacagtgacagtggatgattacaaagggagctatttagcggctgattatttattgtctttgcatcataaaaaaattgcgattattacagaaaatgcaaaaagtaatcacgcccgtttagatgcttttcaagacgctatgcaagaaaatggaatcatcgtgccgcctcagcacgttattacgaccgaagcaagtattcaaaaaggatatgaaagtgctaagcaaattttttcaatgaaggaaaaagtgacggctatttttgcttgtaacgatttattggctatcggcgttatgcaagctgcaaaagaattcaaaattgatgtgccgcgagacttatcagtgattggctttgataatacggttctttctactaccatcacgcccatgttgacaacggtagcacagccgacaaaagaaatggctgtaaacgtagtggatttgctggttagagaaatgaaatatccagcgattcataaagaacatttgcttcttgagccaaaattgattattcgtaaatcaacggctccgttaaaaaggggcgccacagcatctacaaataattgaacacaatcaagaatattgccgttaataaaaaatcctcatagtcacatattcaaaagaatttagagagtctatgaagaaaaaatgagcaattagtaaattcttattgcgctactacataaaggaggaattcaagcatgttaggtaaattaggtgaattaaataaaggatacaacgtacttacagaaatgaccggtcagcacaaagatatgctgatggatattgggatttataaaatgtttcaaggaaaagaggaaactttactagacagcagtagtgaaacggctattcttttactagaaggaaaggtaaagctagagtgggaaggccattcgaaagaaattcagcgccagtccctatttgaagaagagccttggtgtttgcacgtttcaaaaaatgtggaggtcaaaattaccgggcttgccgatagtgaagtactagttcaaaaaacggataatgaaaaaaagttttcatcaaaattatatacccccgaagattgtcaaaacacagtggctggtgaaggagtatgggaaggtactgctcagcgtgtaatccgaacaatttttgactacaatagcgctccttactctaaccttgttattggagaagttatttcttatccaggaagatggtcgagttatccgcctcatcatcatgaccagcccgaagtgtattactatcgttttgacaagccacaaggatttggctgcgcaatggttggcgaagatgcgtatcgtgtagttgataatagttttattacaattcctggtgaattggatcatcctcaagcaacggctcccggctatgcgatgtacttctgctggatgattcgccatctcgacaataatccgtggacagaccgtattatggaagaagagcataagtggttattagagccagatgcaaaaatttggcctgaaaaataaataaagatctctatacgaaatgggttgctgatgttgaaaaacctcgaataaaaaataattatgcgtaaaataatagtttatttttgtaaaatatgtttttatatgttaaaatatagtttgtattaatattcaggcgatgatatcgctctttgctgcagattcctttttaggagtctctttttttggggaaactgaagcaaaagatacagacgattcgtatataaattaaaaagaaaaggagataagcgtaagccgcttatctccttttctttttagcgttatctaatgctaagttctttttcactactttttctaaagcaatttccacgtgaacatttttttcatcgatgtcattcacaagcacgacagttccttttcgtcctttaatctttaaatcatcacctttagaaggaatgttttccctcagctggcttaatagaagctttctgttttcaaaaaagtggacagccaccattttatctcacctaatttcatatgatatgtgtgatacaaagatgtgtatatgaaatccttcctatacattatgtcgccaggggtggttttagaacacattgaatagacaattgttgcatcgatatatgaaataaataggatggcatagttataaatcttctattcttggacatacttatactactaatctaaaaagggatgtggatgaaaatgaaggtggttatcggattaagtgtatttacggtcgttacaggagcaattgcgttagggtcggtttactttttagcaggtatcttttcatttttcttaacggttttttcataaaaaaatccaccaagaggtggattttttatttagcagcggcttttgtttcatgaggcgaattgccgataaatccaaatttcccgccgacaacttcttttacttcgtggatgacaataaaagaattcgggtcaatttgctggattttctttttaatttttaatagctcgttctttttaataacaacgtaaataatacgtttatctttgttggcgtagtagccgtatccgtaaaagatggtggctgcatttccaaattcactggtgatgacttgcgctatgtctttgtattgatcggacataatcgtcattgcttttttgttgtggaaaccttcgataacgacatctacgattttggcacaaagatagacgaatataaaagtatagagcatgttattgacgccaatagcgaaaaccgatgctaaaataattacactgtccatgtagaacatgcttttagagatattatagccttttgtgtagtttaataaataagccaaaagagttgttccaccagtcgatccatccgctataaaaatgagagccagtcctgttcccattagtaaggcgccgaatacaattcctaaaatcatgtcatgaacgtgaaaaggaatatagctgactagaccgaggaaaacggatgtcatgacggctcctagaatcgtataaagaatcgtttttttggttagaaatttataggctaaggcaataaatataaggtttacaagaaatgtgctgatacttgtagggatatgaaataaataatataaaacaagggcaataccaaccgtacttccgtcacctaatttatttggaatgacgaaaaaatcaatggatgcagcaactaaaagtgcgccaacaataattaagataatgtctttatagattgttttcaatatgcaaacctccttgattattaagatattttcatgtggaatcttgtttttactagtgttttataaatgataaaataaaaaacgtcttagaaattgtctagttataaaactgatcaacttctaagacgaagaattacgatacgtgtataggtcttaatccggcttttctatgcttcgatgtcaccgattatataaacctctgaccgctatgtcaacgctgtgagagatgttcaacttttcaaaaaatagaaggcggtttcctacataaaaaaaagaatcctttgcgatggtgcaaaggattttcaaatttattggaatagggggaatacgttattaggattaccattttcataaattaatataccttaatttttcaaaaaaatttatttgttaatgacgattgaaagtttgtaattcacatgctgatttagctctgtcaaaaaatcatttagttcttcatttgaatgaaatttgcattctaataagtagcagccatcgccgctgattttaaagttgttgataacgtgctcctgctgactttctaaaaatgtaaggtaggggtggtgatgaatgctctgcgtatagatatttaaaaatgcatggatgatgtagccgagttttcgttcatcaatgttaattgtatagcctttgataatgccttcatcttctaactttaatactctagcagaagcggcttgtccggttaaatgcactttttctcctaattctttcatctttatacgtccattttttgatagctcttctagtatgcgtttatctgtattatctaacatcgctacaaatcctttcgtatttcaaatcaaaagggttaactacttgatgtcacctatgtatactgatacgtcttctattttatactaaagaaaagtaagaaaaaagagccgtcaatatgtaagatatagaaaccggcagtagtttgtaaacagctagattgacgaaagcttaagcttgctgtatgattctttgagtgtttacgtggttcgtaaccatcccacgttaaaaaactaaggagagaatagtaagatgaatataagaacactttgcgttaacggtcttttagctgctatgtatattgctgtcagtatgttaatccagccgtttggcttcaccaatatccaatttcgtatatcggaaatgttcaatcacttaattgtgtttaataaaaagtacgtgtatggcattgtgctaggagtatttctgacgaatttgtttttttcaccaatggtcgcttatgatctggtgtttggggtaggacaatccgtgctatcattactcattaccattttttctatgcgctacattaaaaatatgtgggctcgtatgcttgttaatacacttgtatttacgttcacgatgtttattattgcgtttgaactgcacttagcatttgatttaccatttttctttacatggttaacaacggctgttggtgagttcattgtcatgcttgttggagcaccaattatggctgcaattaataaacgcgtacaatttaataagctagttggataaaaaagatggggctgtgataaatctcacagccccatctttttttctttgttattctataagtgtagtgataaataaaccccttattattgaagagcttttcacgcatggacaaattacccatatctagcatgtgaaaagagcaggtcgcgtttgcgatctgctctttttgcgtaaggcaataggaagtattcggttagattattttgaaagaaggagtgacaaatctcacagcgcattcttttttcttttgttacgatatacatatagttggcaaactccttatcgaaaagtttttcgcacaacaacacattacctatgcgtagcaattaaaaaagcagaccgatgacggtttgcttttttaattatattttaccattaaataactttttggttataattgtaaaataacctttgttactagagaggggattgttttttgaatagaaagttaggaattcttgttttattagctttagccatcttatttgccgggtgttcaaaagaagaagacaatgttcctttaagagaactagaaaagataagtattaacgtaatcaaagaacaaaaaatgaagcaaggaatttcatatgaaatggaattagtaaacaagagcgatttgaccatcaaacaaaataatgtatttttatcctatcctttaaaaatgaaaaacggttattctgataataaatttaaggtgttagcagaaggaaataaattaaatatcaagccaaaacaaaaggtgaagttaacggcatttcttccttacaaaggaactaataaagaagcgttaggtattgatgagcctgacgtaaagtgcatagggtattggaataagcttgatgattaccatcaattttcttttggaggatccttgaagcaagaataatatataactatttgttaaatggtggaactgagcgtaagggattgataaaggcggtgaatgaacagtgagtgtagacacggatagattgattagcttctttattttatggggaacacccgctgtttttagtatagtagagtactttaaactgagtaaaactgaaaaaaataaagcgatacgagacttaatatctttaaaatctattgtaacaacaggttttatattgaccggaggagtgatagcgagtttagggaggttgttatctctgctgcctctccaggttataggtacttttattttagcaatgggtggtattgttggcgctattgaagcatggaaggtaaaaagaaagaatagtattgttatccttgttttaatagtatctatgattgctcttacatttataatataaattctgcatgtaacaagagctgctcaaatcatgagcagctcttgttagtttcttatttattgcgtctccagctgctggtcttttttctttaacgtaagagcgagcaggaacgaaacgacggcgaaagcgatggctacataatagacggtatgtaccccgcttgtcatactttttatttgtaacagcgttttattcgtttcatttgattgttgaataaagtgctgagaagccatggtcataatacttgtatacaaagcgggtccaatcgcgcctgaaacttggttaatcgtatttgaaatggctgaaccgtgagcatgaagcggttttggcacttgatttaaagcaagcgtcatcacgggaccgatgtttaaacctacgccattggttgattccatgaaaacagctccctgatataattactaattgatcggtcagtataatggtagcaaccctatacggatcagtcaatctagacgtttaggtcttgtataggtgtggagattgacgttagtttgacaggtgtaagcattgcttgaaatgttaagaataagattacaaagtattttggatctatacttctattactgttaaaaaaatatgatccagtaatgaaattaaaagaagacgagaagcgtatagcatgttacgatagggacggtatagaaattgacacatatctgtttctaatagaagagacaaattttaaaatttttaaatgtaaggttgtgattcacctgagactgaataaatttattagcgaatctggcaaagcgtcaagacgaggggcagataagttaattagtgaaggaagagtaaccgttaatggaaaggttgcaaaagtcggagatcaagttaagcctggcgatgatattcgagtaagcggccaacagcttcggattgctcgaaataatgtatatattgcgcttaataaaccagtcggcattacaagtacgagtgaaaaaaaagtaaagggaaacatcattgatttagtcaatcaccctttgcgtattcaccacgttggacgacttgataaggattcagacggcttaattttacttacaaatgacggcgatattattaatgaaattttacgtgcagaaaacaagcatgaaaaagaatatattgttgcagtagataagccaattacaccagagtttatcaaaaacatgtctgagggagtgaaaattttaggcacaaaaacgcttccttgtgaagtgacacagctgtctaagtatgagtttcaaattattttaacacagggtttaaatcgtcaaattcgccgtatgtgtgaagtgctcggatatgaagtgtaccgccttcagcgcactcgtattatgaatatccatttaaataacttacctgttgggcaatggagagatttaacgaaaaaagagcgtacgcagctattcaaagaattagactatgaacctaaagagtggtaaatcaaaagacaccagcctgttagactggtgtcttttttattcgcatacaactacttgtctagaaaatacgcttttgcgcgctacgcagcgatctgaaatagaaaagccagcttcatgaatcatatggtcaatcgtatctactgtaatcacgactactttatccgcaaagcggcgagcgtgtttcaaaatagaaagctgatcttcaggcgtcgcgtgggtgtagagattgtaaggcatgtcgatgatagctacatcatagtgagttgtaacatccgaaatcggtcccgttttgacatcaccgtttaagccgaaatacgcaatattttcacgagatccgtcggtcacaagtggattgatatcccgtcctacaatatcaatgcccattgaaagagcttctaccagaactgtaccaataccacagcatggatcaatcgctttgattccttcaggatttggaacggcaatgttagctacagctcttgcaaggcgggtactgagtgccgtagagtattcacgcggtttcttcaaatgatgcagccatacagcttcacttttttgatattttccaaaataccagcgtccttcaaatggaacaatgccaaacaaatggtcagggttatgcaagtctgcttctgctacaaaatgccaacccacatcacgttcaacagcacgctgacctttataacttattttttgatctttttccaagtcattaattttcataaaaatgagtttgaatgtttgatctccaaggtcaatatcttctacttgtttgcaaatatccgcaaggtcatctgattcatacataatatctaatcgctctttgataaaagggcttctgcttggatcaagtttaacggcactttttatgataggtttctcagtttcaatttcaaaaagagagcgtctctctaattgacatagtgagagttcctcttcgctgcatgcgtatgtgtagatatactgaggcagctgcgtatggttattcaatatcgtatcatcctttatcgtatctaattatccttcttctcaaacaatagcgagaaaagaagagaaaagcaacgaatttaaatatatttggccgtgaatactaaattgaagcgctacatagtccacttatttgacaaaacatgctaaaataactggtgataacctgcatgtgctgctgtttatacaaaaaaactggatcaaggtttctcaaaaatcatttacacactgctgacattttgatgaataggagaggctacgtgatgtctaaaagtgatcatgaaaagcaacagatgagtcgggctgatatgaaaaaacaagctaaaacatcctcgcaaaaccttgtgatgaacgtactcattgccattgtatctgtatgtattttagctcttattataaatatttttgtactaatgaaatgagccgttatgctgctcatttctttttattcggttcagctttcattgaagagtttgagcgctctttcactagagagcacatttggaatagcatatctttttttacaaatgatagttgtgatatgataaagcaataatatattagacaaaaagctggaggttacttagtatgccattacttagatttgatgtaatagaaggaagagatgaaaaagagttaaaagcattactagacgctactcaccgagcgatactagaagcctttggcgtcccagaacgcgaccgttatcaaattgtacatcagcatcctgctcatgaaatgattattgaagatacaggtcttggctttgagagaagcaaggatttggttattataagtgtaacgagtaaacagcgaacagaagagcaaaaacaagctctttacaaattaattgtaaaagagctgggagaaagctgcggtattcagccaaacgacattatgatttcaattgttgagaacggtaatgctgactggagctttggcatgggagaagctcaattcttaactgggaaattataaaacggtttattatctagagaagcccttatttctaagggctttttctcattttgtctataaaaatattattctcttagtcacatcttactcaaaattaaatacagacatctgtcaaatgaatgatacaataagcttatatgccgttttgagtagaaaaaccaaaaaagagttcggcgtactaactgcagaacaacaataattttacataaagatgtaaagatttaaaggttaaaagagaaatgtataaaatctgtaaaacaaaagaacagttacgccttaaatatagtagtaaaaggttcttcacgtgttttttcggataataagagaaagtaattttgatcattgaggaggaacttagaatgtttggatttgatgcagatgtatcgccattagtgcgaattaaagtaattggagtcggcggtggaggaaataacaccgttaaccgtatgattgaacatggtgtacaaggggtagaatttatcgccgttaatacagatgctcaggcgcttaacttatctaaagcagatgtgaaaatgcagattggtgcggccttaacgcgaggattaggtgcaggagctaatccagaagtgggaagagaagcagccgaagaaagcagagaacaaattcaagaagtactgcaaggcgcagatatggtattcgtaacagctggcatgggcggaggaaccggtactggagcagctccggttattgcccaaattgcccgtgaactaaatgctttaacaattggagtagtcactcgcccgttcaagtttgaaggaaataaacgtacgaagcaagcagtaggtggtattactgcgatgaatgaatcggtagatacccttattgtgattccaaacgaccgcttgcttgaaattgtcgataaaaagacgcctatgcttgaagcattccgtgaagcagataatgttcttcgccaaggtattcaaggtatttcagatttaatcgctgttccggggctgattaaccttgattttgctgatgtaaaaacaatcatgtctaatcaaggatttgcgcttatgggtatcggacgagcttccggatcagaccgggcaattgaagcagcgaaaaaagcgatttctagtccgctgctagacgcatcgattgatggagcaagaggcgtgctgttgaacattacaagcggcagcagcctgagtctttacgaagtacaggaagcagcagatattgtcacgtcggcttctgatcaggacttaaatatgatttttggatccgtgattaatgaagatttaaaggacgaaatgatggtaaccgttattgccactggatttgatgatgaagatgtttcaccatcagcttctacttctagagtttcaagagcacgctactaaattaaataaccagcttttatggtggcaattgtttttcaattgccttaaaagggaatccggtgcaaatccggagcggtcccgccactgtaacaaggagccttatgccaaaaagccactgtctatttagagacgggaaggcggtataaggcaatgacttgaagccaggagacctgccataaatcgcagcacacaataacctacgaggatagggaggtgttttggcagaaccaaaaataggataaacaaggaatacgtttatctgaatttgttgtgaagacaagcacttctttttagaagtgcttttttgtgtattaaaatagaaggtggaaaaagcaatgataaataataaaaaactcgtatctatgatatttcttgtgttactttgcctcactgcttgcgctcctaatgaagagagcataagtataaaagaaagaaagaaaacggataaaagtgtgacgtttttatttaattttacatctgcaacgcttgatcctcatacggatgataattatacagcagttcgtgcgggagtaggggagacgcttgttaaaatcagcaatgatttaaaaataaagccctggcttgctgaaaagtggaaaacggaagataacggtcttacgtggacatttacgataagaaagaatattacgtttcaaaatggtaaagcgctagatgcaaatgccgttaagtcttctcttcaaagaacgatagatcaaagttatgcgatgaaaaacgctttaaatattaaagaaatgaaagcgaacggtcatgcgctgacaattacattaaaagaaccaatgcctaaatttccttctgagttagtgcatccaaacacagctattatagatattgatgtttctaatatagctaagaagcctattggcacaggtccatttcaagttttgactttcgatcaaggaaatcaagtgaagttagaaagatatgaacattattggaatgggaaagtaaaattgaaaaatgcgatctttgcatttaacgaagatgctaatgcgcgagttgcggctcttcagtccggaacagccgatattatttatcgcccgcctttagaaagtttgggcactttacaaacagatccgtcttttaaggtaagtggagtacctagtgtgcgtacacatttattactttataatcaaaccaatgacgcattaaaagacgaaaatgtaagaaaagctatcgataccttactgaaccgaaaagaaattgtcagcagcatcatgaacaatcaagcggcagcagctcgaggtccatttttaccccaatttccttttgctgataataatgctaatgagcaaagaggtatgccatctgctaaaaaatatttagagaaagcaggctatcaaattaaaaatggcaaaacaatcaaaaatggaaagccattatcgctctctcttgtcacatacagctctctgccggaacttcctttgattgctcagcttatacagtctaatgcgaaagagttaggaattactattaagattcatctcgttgaggacagcgatgaatatgtaatggcaaaagacgattgggatttagcactgtacagtcttatcactgcacctagaggagatgcaagctattatttaagtacgaactatttgccgggcggtggtttaaatgccagccggattgataatgataagctaacaaaaatgattcatcagttaaatttaaccatagatgacgcaaagcgagatcagttagctaagcaagcaaccgctttgattaatgaggaaatgctgacatcatcgattgtacatccaaacattgttgttgcttataatcaaaaagtgaaaaactggaccacaaatccaagcgagtattatatgctgactcagcatttagacgtaacgctatagtcaatattgtgttgttcctataggaaaaagagaaagtatacaatgatagataaaaggatgtgacagtaaacgtgcaagaagtacaaatgtatcaaattaaagaagtaacagaaaaggatgctgaagtgagtcagtttgtcatgaatatgcggaatgagctatttcctatgatggaaaaaaatcagcttcctgtggatttgcttcattttaatgaatattatgttcaagcgaaaggcgctgctttttttgcagctgtcacggaaaatcaacaagtaattggaacaatgggtttatacgcttacgatggaaggtttcatgcattaaaaaagcgatatgaacataaaactgcagccgagattgtaaaatgctatgtcgatccagcataccggcgtctaggcattggacagcagctgttaaaagcagtggaacaatttgctcaaagtcatttttatgacacgttgtatctgcatactcatccttttttaccgggggctattccattctggacttcacaagattttatcgaaaggcttgctgaacaggatgagccatggaatacgctgcacatggacagaaaaatacaaccggtcgtaatgtaacgatattatacagtaattaccatagaatctagataagagctcatgctataatgagcgtacttacatttatagcctgtagggcaagtccttacagaaaaaaaccacgtttcgaattggctgaaacgtggtttttttctatgaaaaacaaataacaaaatatttttaaaaatatctatgaaatcgctttcaaaataatgaaatatattatataattactagtgttgtgttgtactttgttagtgttaaatcaatatcctacatgtgtgagccgattgccttatggtagtcggcttccttttttatgatagagtctaaagggaaatagcattcgttaaaatggctgtaattgtcatcacaatagttgtcccaaaggcccacttgaaaagaaacttttgatgctccccgaaatctacttcaaccagcccaatcagaatgaaagtagcgggtactaaaggagataggggaaacccagttgtggaatgtcccaataaagctgctcgtcctatttctacagggtctacaccaaaattagctgctgtatggctaataacaggtaaaatgccaaagtaataagcatcaggtgaaaatacaaagctgagaggaaggctcgttattgctacaactaagggaaggtgagatcccagccattcaggagtgaggctgacaatggtattagccatggcatccatcatttttgtttctgtaaaaacgcctgtaaagattccggctgcaaaaaccaacgtactaaccattacaaagctgtttgcatgacttaagattctttcctgctgttcttttgggtgaggaaaattaacaaataaagcaatggcaaaagcaatagcaaataaaataggaatagggagtatgtctacgaccaagatagtcattaagcacagtgtcaataaggcattaaaccaaaagagtctaggtggcttcccaggggtttcatgaactgaaagctgttcagcaaaagccattgatgaaccttttaaatgaatggtgcctaagcgcgctttctctctctttccgagtaagtatgctgaaaataaagtccacatcaatcccgctgccatagctggaataagagggttaaatagatctgatacttctaattgcaaacttgctgcggctcttacgagaggacctccccaaggaatcatattcataacacctgcgcttaaactaataacacaagccagtattagtcggttcattcccagttttgtgtacaaaggaagcaaggcggaaactgtaattaaaaatgtagaagagccgtctccgtccaagccaacaagcattgtaataacggcagttgccattacgacttttaaaggatcgcctttcacaatgtttaggatacgagaaatcataggatcaaataaaccgacgtcaatcattagtccaaaatataaaatagcaaaaacgatcataatggccgtaggagctacttttaaaatacccttcatcatcatatcgcccatatcggcactaaaacctccaattataccaaagaggatagcgacaaaaataaaagcaacaaccacggacaagcgtttactaatgacaagaaatagaaaagtcgcaatcattccaaaccctaacaaagaaagcattatccatcacctcttaaaaagttagaaaattatattaatttatattatagcactagatttaatgttaaagtttggtatttttaaataagatagcttcaaactaaaactaaaaaagccgccttataggcgactggtttaagctaggtcagctgttatggactgcttttgaaggtgatcagacagcaggctgtaagcaataattttgtttttatactgttttacgacatcgacatgatcatcataactgtatacgcataatcgaacatctttttttccttttttcgtatcgataaccagtggagtttcactgtcttctaggtgcttataatagtccttatttccttcatggacataatattgttttaaaaatgttgctttattaaaataatcaatcatttgcattttatttttgccttctaaatgtttcccatcaactgtgacagtaacgctttggtcatcaagtgttggatgtaattgaaatttagtcataagccatttgaccactggagttggaagacacgttactaatattttgagcgcacttacaagaataatggaaagtagtacaatccacgtcatagttaatcatctccgctatagtttaaatgaaataagattacatacttattttaccacagagaacatgagtactttttgtacattatgtgaaccttctttagcgaaaagatgtatatgaaatgcgtttatttatgcacatttagggaaatataaaattataacaaatactacatataaaaaaaggagaaaaaattatgttgtggacgattattggacttttatttattttttggttattaggattagtttttcatattggcggcggcatcattcacattcttcttgtcattgcagtgattgtgctgatcgtaaaacttgtgaaacgaatttagatataaaaggcctttccttagggaaaggccttttatgtggagagattataaaaacaagacgtattttgatataaaaaatcatatgcttccgttccagaaactcctttgagacgtgctatttcctcaacggactgatgtatcattgatggaaccgttgtctggttttgaaaaggtccttcaaatggccacggaccatctgtttcgaccatcaagtagtcaagagggtattccatggcaagcgcttggattttaggcttatatacaatatcgggtgtaactgaaatatagtaaccgttgtttttcattcgttcaacggtttgtttagctcctttgaaccagtggaagtgagctttagacacggaatgtttttctagtaagtcacacacaatttcagcatcttcatatacagcatgcagaattaacggctttctccacttttttgaatgaataataaaagcttcaagcagctccaaatagggctctagagaaagagggtatgtctgccttaagtaataaggtagaccaacctcaccaacagcgatcatttcttcattgttttgatcgatccaagcaaacagctccgctaattcatttggagaaggcagcatttgttcagggtgaaatccgtaggcgggtttcacgcaggaatataacttgctgattttttgattaagttggcaagagtgtaatgtagaagatacagaaataagcgcttgtaacgaacgatccttctctattatgtctttccatcttttcggttcatattgatcgaggtgaatatgcgagtcaatgattcgtttcataaatactgctcctcccagcccattttgtttaaaaataataggtaagaaaacgtatgcttctgttagacctccactttatttcttatttgttttttgttcccccatttagtaatagatgaaaacgtataaataacaagagctaaccaaatcattgcgactccatgtctaaaataaaaccacatcgcatgttcctactaaggtaagtgcttacacaagcgcgcatgatatgcgttccttcagtttatattcaagtggttatgaaaaacagttgatttccccattagaaactgtcaagcttagggaagaagaaaatcttagaggaaagaatatataggtgacgaatatgatcgaaataaaaaagtctacgataagcgacggagaatttaatagaggtgtatttgctaagcaagatattaaaaaaggaacgcttattcacgaagctcccgtaatcgcttatcctaataaagagcatgattttattgagaaaacaacactagcggattatgcttttgaatatggagtgaatcatacggctattcttttgggatacggtatgctgtttaatcactcgtatacaccaaatgctacgtatgaaattaattttgacaatcatacctttgatttttatgcatatacggatatccaagcaggggaagaaattctcatcaactataatggagatgaagatgatcaagagctcctttggtttgatcgtgaagacgaagaagaacaaaagtaaaaagttaagcccattgaaaatcgatgggctttttattatgcttttttatctggatacatagtagaattcaaacggatgaattgataaatatgcgtaataataacttttaaaacggcatatccaggaacggctaaaataataccgatgattccgaataagtttccggcggttagaatgacaaaaatgaccgtaatcgggtgaatgtctaggcttcttcccataatttgcggagatattactttaccttcaagcaattgaacaactgcccagacaatggctagttttacaagcatgaaaggagacgtaataaatgcaataataatggctggaataatggcgataataggaccaaggtatgggacaacattggttaccatggcgataatcgctagaagtaatgcataatctaacccaataatcagatagccaatgaaaagcagtacacctatacaaatcgcaacaaaaatttgcccgcgaatatatgcgcttaatgcgtggttcatgtcggctaaaatgaatttagcttcagaacgagagcggtttggaagcagttttacaatgtaattaggcaagtttttcccatcttttaataagtagaaaagaataaagggtaaaacggcaaccgataatataatttctgtaatggtgccgacaaagttcacaataccgcttgaaaatccagaaacatatttactcaagtgttttgatgcatcttttgaaatcttatctaggtccgtgttagccgactgaagaccctgttcgacatatcggttattcgaaagattagtcaccgcatgctgaacgtcatgcgtcagctctgggatattatcaataagacggtcaacttgattttttagaggcgggataaccgatgaaataataatggctaatgcgccgataatcactatatataaaacaagaatggaaataattcgttttacaccttttcgttctaaaaagtcaacaagcggattaaataaataaaagcaaattcctgctaggataattggcaatgcgattgttttaataaaaatagagataggaattaaaataaatccgatttttgataacgaaaaaatagtcatgctgagaataaaaataataattgtatatacaacaaatttattatttaagattttttctcggaaaaaagttcctttctgaggtctaggttccaagctgttcaactccttttaaaaataaatgtatagttatcataccctgatttagactaatttaagagggttttttacaaagaagtgtgcatactagtagaaaatcttctagaaagaaggggtgaaatcattgaaagaagacaaacaaccatcgtatgatgatttctctacagtagaaaaaagccatgagtatataaccgctgaagaatttccagacgggcctttcggctctcctgttaatcaaaaactggggaaatctacttcatgggaagaagggcagcgaacgtatagcgcatttaattatgaaaacaaaaatcttcatgaaaaagcgcagagattatttccaggcgctcatcctgtacatgataacccagaggaacatgaacaaaatccaagttaatgtctttattatgctctgaatatattgccctatctttttgctgaattatgttgacaataagcaatttagcctgtaatataaaacgtaacttatcactgtttctacaggattcgacaaaatctgatttacttaaacttgtgatctcaacttctatttacagctattagagcgctgtaagtagaagttttatttatgttatcgatcaaaaagaaaaaagcaggtctgctcaagcaggcctgctttttttattattgaacagcgtcaaatttatttactttccactgagaattagatttatagaatgtgacagttcgttttacgctgccgccatctacagttggaactgtgaattcataagagcgaactgttgctgtttgatacacaagctttgtttttgcttttgaccactctaacatgctgaatccgtcgccgattgggtgtgcaagtttgccgttatatgtgatatagccgtaatttgttaatcctttttctactgcactatttgtaaatgtctcagataagtagctagatagctcagcttttgtatcaaattcagggcaaagatacacgtactcagttcctttatattcaaatgtacgttctgtacattgtttgtttttataaccgtgcagagcactccagaaatgattgctggcactagctgcaattttgacagcatttgcatccgttaatgttgtagatgttgtttgtgctgtaactccagtgcttagtgtaaagaaaatagcgattgatgataaaactagtccaatttttttcatttctaactcactcctaattaattaaccttatttatgtaacaattatgtgttttatatttcttttgttacatttatattacaataaatctgtaacaaaagaaagtgttttggctttttttcttaattttttttagttttttactagtttctaaactaggtatagtaagagaattaccagttaaaggttgatttattaacattttcaggcgtttctttctactttttaatctttttattacaaaaatattgtttgtaacgaaaatgtaataaaagaagcttaatacctttacgatacagaaaaataaagataaaacggtgaaaaagtgaatgtgaaaactgtttttttcctttttttaggcatatttcttttgccatttacagctttttagtagggtagattaagtagattaagaggaggcgaaaggatgaaaggcattatacatagtgaaaaaagtggaatagcaggcatgaagtacagagaccttcaggagatgcaccctcaaaggggagaaataaaaataaggttaaaaacagcaggtttaaaccggagagacttgttcgttatgaaaaatcgaggtaaaggagataagccgattattcccggttcagacggtgcaggcattatagaggaattgggagaaggcataaaaggtttaaaaaaaggaatggaagtaattgttaatccgagtctagagtgggattgtgtagaacacgttccacttacacctaaaattttaggcggtccatcacatggaacatttgcagagtatgtaatcatacaagcaaataacgttgtacaaaagccatcttatctatcttggaaacaggcgggggttctttcactatccgctttaactgcttatagagctctatttacaaaaggccaattaaaaaaaggagagcacctccttattcccggtataggaagcggagtcgcgacctatggattgttattcgcaaaagctatcggagctaacgtaacagtcacttctagaagtggtgaaaaaagaaagcaagctctaaagcatggagcgaattatgcattagatagcggaagcaacttaaaagaagaaaccaacaatagaaaagtagatatcatacttgatagtgtgggggcagctttatttcctacttattttgaaatattaaagccaaatggaagaattgttaattttggcgcaagttctggaaatgaagttgaattacctctaagaaccattttttatcctcaattcaacatacttggtacgtctatgggaagtcaggaagaattcgtggacatgatggattttatagagaaacatcaaattaaaccaatcgtcgatcgattctatccgctgtcagaggcagttgcagcttgcgaacgattagataaaggaaaacaattcggcaatataggtttacttatttcagaataaaaaaacccccagtgctaactggggacttttttatataatcaaacgtttgtttaaatgaaagaaacacggtaataacagttttttagcgcttttttatcataaccaccacgccaataaaaaggtaacaaatcctcctattatcaaaaatcccatgctgtatttgagcgtgtatttaaacagttcaccttcttttccagccagtcccactgctccggcagcgacagcaattgattgaggagaaagcattttagccatcacgccgccggcagtattggccgctacgagaataaccggcaagacattaatttgctgagctgtagttagctgcaagttgccgaacagcgcattatttgatacgacagaccccgttagaaatacgccgatccagccaagaaatggggataaaaatggaaaataagcagctgatgtagcgagcgccaatccaagtgtagaagactgtcctgagtaatttgaaataaaagcaaaagcaatgaccatcataatagtaataataggccttgataattcttttacggtttctaaaagagtggtccatgccacttttggcgatatgttaagcaagaaaactgaaaggatacaagcaataagaattgctgtacctgttgctgcaaatacgtctatttttaagatagcagcgtaaggcgtaggatcttttactaaaggcgctgctttaattacgtgattgtgtaaaaatgggacgttaataagcaggttcatatgttcaagcattgttttgacaaaagaaatgctccaagccgtaacgagtatcgttaatagaataaaaggagaccaagcctttaaaatctgttttggtgacaggctgaagcttttagccgctgccgggcttgttcgtttaatataaaaagcaagagcaagtaaactcacaatagaagatgtgatatttggaagttcagggccgatgtatgtaacagttaaatactgtgtcagtgcataggaaacggctgtgatgctcgttgctttccatacgtcttttaatccttttatcccatccataataaagacaagtaaaaaagggataagaaaagaaataatcggaagctgcgtgccaagaaaatgagcaatttcttttggatctatgccagatacttgtcctgcgacaataacaggaatccccatggcgccaaacgctcctgaagctgtattagcaattaaacatagcgccgctgcttttaacggtttgaacccaagtccaactagaagcgctgctgtaatggcaattggagctccaaatcccgctgccccttctaaaaaagcattaaaggaaaaagcaacaagcagcatttgcaagcgggggtcgtcggttattgaaataatagattgtctgatggtagtaaactgtccgcttttgacagttagcttgtataagaacaccgctccgataataatatagctgatgggccaaagtgcatacagaaacccatagcctgtggctcctaagatcattgaggcaggcatatcataaaaataaatagcaataatcatagcaagaagcactgtaataccagcagcaatatgtccttttaatttcaaaagagttaaagcaataaagaaaaagataatggggatgagtgcaattagtgcagaaagccaaatattatctaacggattatatacctgagtccacgtcatattcatacacctctactacatatttaaaacaagggagcgggggagtcccccgcaaaaatctttagatgttacacaaaagctctgtcgcgagtttgcttaagaatgctagcagagtgctcgagctgctgctgttcgtgaggggttaaattcaattcaataatttgacgcacgccgtttttattaatgatagctggtacgccgatatacacatcagaaataccgtattgtccttctaataaagcagatactgttaaaatagaattttcatcatctaaaatagccttggtaatgcgtacaagccccattgcaattccgtaataagtcgctccttttcgattaataatatggtaagccgcatcgcgggtttgttcgaatagatgctgcatatcgggttctttttcaatagcggcagtattgataaaatgttcgagcttcacaccgccaatttgcgcgtggctccaaacaggaaattccgtatctccatgttcccccataatataagcgtggacgttgcgagaatctacttcgaaatagtcgcttaacaagtagcggaagcgagctgtgtcaagaatcgttcctgaaccaattacccgttcgtttggtaatcctgatactttttgtgtaacgtgtgcgagaatatcaactggatttgttgccactaaaatgatgccgtcaaatccgctgttcataatatcttttacaatgcattcaaaaattttaacgtttttttcaactagatctaagcgtgtttcccctggagcttgattagcgcccgctgtaataactactaaatcagcgtcagcacagtctttataatctccagcccagattttcatcggtgtggcaaatggcattccatgattgatatcacgtgcttcaccttctgctttttctttgttcatatcgattaacactaattcattggcaataccttgattcaccattgaaaaagcgtagcttgagcccacaaaaccagttccgataacggcaacttttcgtgtttttggtgtaaattgtgttttcatttgtatcatcctttgaattttattttgtgatgtttttcacaatgttagtgtaacaagaataaattgcttcagctgtgataaaaatcacaccctttaaaaaatagtaaacaattttacagggcgatttaaaaaaatgtccttctacatgaagtgccacatttagaaagatcttaaacgtttaaagtgttgagtaaaggcaacttgttttgcagaaagctaaagagtttaacattctctatttgtatgttagcagccaataatgtttctatagacccacacgaaatccatttgttacactaagtttgcttattttgaataaaggagtggaagggatggagaactactatgagcaagcccaaaaaggcgcttgggttagtatcttatcatatatctttttatcgacatgtaaacttatcattgcgggtgtcaccgcttcctctgcattaaaagccgacggtcttaataatgttacagatattattgcatcaattgccgtcttagtcggcttaaaaatctctaaaaaacctcgcgataatgatcatccctatggacattccagagcggaacatatctcttcacttattgcttcttttatcatgatggtaatcggactagaagtattggtcgatgcgggtcagtcattatttatggacaaatctgaagcgcctaatttactggctgcttgggtaggtcttggagcggctgctgttatgggtggtgtctaccgatataatattaagcttgctaaaaaacttgatagccagtctttatatgcggttgctaaagataatttgtctgatgcacttgtgagtataggggctgtcgtgggaattttcggctcacaattcggcctgccctggctggacgtggtagctgcttttgctgtgggaattattatttgtaaaacagccattgagatttttaaagaagcggctcattctttaacggacggatttgatgaagaaaagttagggcactacaaagaaagcatcgagcttgtagaaggtgtaaaagaagtagaagatgtgaaagcgcgcaagcttggtaatcaagtcgtgattgatgtaactgttaaagtagatccccatttaaatgttatcaaaagccatgaaattgctgatcaaattgaacatataatgaacgatgagcatcaaattaaagatacgcttgttcatattgaacctgatgcatacgaaaaacaaaaataagaccagcacgttctttcgttatgaaaggatgcgctggttttattttgcgggaatttgaaataaatcacaaaaacttcttcaaaaatgaaaatgaaaagccgttattagtaatataaagatttttgtagaagggtgagggaatgaagaggttaagtgcaaagctcgtagtattttttagtatttttatagctattttattattagttgtttcaggggctgtttatcaatttaccaaaacgcaaatagaaaaagatgtagaaattcagtctcaaagtcaagtgaaagagttaaaagaaaccattcatacgtacttagacatgtatagtcgttctttgctaacgtatagtgaaaacgatgtaattgttaattttgttaagcaggaaggagatcaaacaaaccaagagaaaaatccgtattttacatggaacacagttcaaaaagagtttacgcagtttaaagaaaagtatccaaacctagcacttgaatacataggcactaaaaataaaggaatgtattctgttcctaaacaagagtttggttcaaactatgatccgacttcaagggtatggtacaaacaagcagtagaatcacctaatgaggttatttatacggatccatatgaagatgcagcaacaaaaaagacggtcgtgacaattgcaaaggctattttagatccagatactaaaaatgtgctgggcgttatagctactgatttagacttagatgcattaaaaaacattgtaggtaaagcagaagtaaatcacggtgggtatgcatttttatttgatcaaaatggcacagcgctcgttcatccaacagaagctgggaaaaatttgatgaatcagccatttatgaaaaaaatgtacgaagcagaccggaatagagatttcatgaagtatacctttcaaggtgaagagagagtgatggcatatgatactctcgaagggacgaattggaagataggaaatgcctttatttataatgaaatgctctcaagcgctcatcatttactgactgttattgtctggattgcgttaattggcatcttattatcagtggtgttaaccatctttttctcaagaattattactaatccgattcgccgcttgaaaaatgaagtagccaaagtaacagctggcgatttaacggttcaggtgaagacgaagtcaaaagatgaaattggtgagcttactcatttatttaatgatatggtagccaaaatgaaaacattgattggcacggttcagacatctgttgagacagtaaaaacgtctgttgaagacttgagtgccgtatctgaagaagcaactgcatccagtgaagaaatcggccgggctatccatgagattgccagcggtgccacgcagcaagcttctgacgctgactctactaatcataaaacgatgagtttatcttcgcaaattgaagaagtcattgaacaaaatgcacagattaataaaatgacgattgaagctgtaagcatcaatgaaaaaggtttaaaacagatgcagctccttcgcagccaaaccactgaatcgtctcaaacgattcacgctgttcaagctgtaatggaagagttaacaaataagatgaaaaaaattgaatctattattttcacgattaatagtatttcagatcagacaaatttacttgcattaaatgctagtattgaagcagctcgtgcaggagaacatggcaaaggatttgcggtagtagctgaagaagtgcgaaaacttgctgaacagtcctctcaggccactgaacaagttcgtcatacgattgcagtgattcaaggtgaagtcgctgctgcgcgtgaagaatgcaaccgtacagaagagctttcaaagtctcaagactttgtggtaggagatacagaacgagcttttcatgaaattgcaactacgattgaacaagtggcggcggctgtcgaacatgtgacaagcagcatggacagtatcgatgagcataaggaagacgtggtagcggcaattcaaagcatagcagccattgcacagcaatcagcagcaggaactgaagagattaccgcttccacagaagaacaaattagagctatttctactgtttctcaatcagcggaacatctgcaagagattagtgaagaattggcgaacttgattcgtcaatttaaaattcaatagaaaaaaagaggctaggacaaaagtattttagttaaaggaaaatccgaacgatgaattgagattcttgataaagaattcaactcgttcggatttttttattgatatggtgaacgcaggtttcatgtaggtatctcaagcggttcagcgcacttcttctatttgtttgcccttagctggttgtgtcttaacctctcttttatgtttaataagaaaacaacttgctgtaaggcgaaaagacttgctgagttagaggtgcaacagctgatacgcgctgacgtgtaaacgggtgtataaaagaaagcttagtggcatgtaaagcttgctgctgttcttttaatctctttcctccataaagagtatcaccaagtaatggatagccgatgtgactcatatgaacacgaatttggtgagtgcgtccggtttcgagcgaaagttcaataagcgtttcgtttttcgccgtattgcgttttaacacccgataacgtgttttggcagcttgtcccgttctagatactcttcttcttgtagcgtgatgacgatcgcgtccaatgggttcattgatgattccgtcctctttttttatgattccttggacgatggcaatataagtccgattaattttacgttcagccagcagctgatcaaacacagagcttgctacaaaatgcttcgtgaataagatagcacctgatgtatcgctgtccaaacggtgaacgtgtctaggctttgttttgaggcctattttttgaaaataagcagctacagcatttaaaagagttttttggtcttgttctgatgaagggtgagtatctaggttgattggtttgtttacgattagtacgtgctcatcttcaaacaaaatctctatatcaacattgtaaggtgttatttcattaggctctgcttcaaaaaaaggaagtgacattttatcatgttccttaagagtgtttctccatggtaaaggctcgccgtttataagcacatttttcttcatccgaaactgatgcagcgtttttttaggaatacgccatttcgtttttaaataatcttcaattgtttgccctgcatcattttttgcgattttatcttctagccattggccgtgtatactcatatttaatcccttccttacatactagtaaatatcctttaatcttttaaaagaacttgtaaataattaggaggaaataactacctgaagttctcgttttatgtttatgttatgctaaataaagagacataagttaagagaaaaaagggggggtaaccatgaaaattgcccaagcagctccgccagaaatggagaattacatagaagagttgactgaacagcttcgttatgacttgttacctcggtatgtatctgtagataagcttaatcctgatgaattattgaacccagattattgtacagaccatttatataatggcttactcgatgaagcattgcaagtcattagtagccttcagacaataattgccgtgattgaagcgatccagcatcggccgattgaagaaagcgactgcgagcaattcgaaaaaaatattgcaattttaaaaaaatacgggttcttatttcctgtttccattgagtgttttgcaaaagaaaacaatttgattacgtattcgtatgaatcgttttataattcatacataaattgaaaagaaaaaagcatgattatcccatgcttttttctttttttaatgaattttggctttcaattggataaaaaaagaacttgtgatatcgttaaattcgtataaagttcttagagaaacatgaaatcaaatactattgcttttcatataacaaataaattgaaataatacagatgtataacgtactgtaaattatgtaaatcatactaaataatgttatgattagacaggccgtataaagaagagcatttacctttcataagattacagaacgtttcaatcttattacatatgtttaaaattagcctaaatggtttctttttacgcctatatcatatacaatgccccctagatgattttttcgaatagctaataatcgtttgggattatgaaaggagattaatcatgaaaaaactgatgtatacattgctcattggggtaattgctgcagctttaacagcatgcggttcaaacgatgatgcaaagcaatcaaaaagtgatgatcagaaaactgcacaaactgagaagcaaaaagaggctcaggaaaagcaggaaaagcaagcaaaagaaatgcagaagaaattagataaacaaaaagtagatgagaagaaaaccgtagcggttgtaaacggtaaaaaagtttctggtgaagaatataatgcggcattatcttcatcacaagcccaatatcaacaaatgggacaagacccaacatctaaagaagcagctaaacaagtaaagcagcaaacaattgacaatttagtagggcaaacgctgctattgcaagaagctgaaaacaaaggctataaagcaactgatgaagaagtaaataaaaagttaaaagaaacgaaaaagcagttcaaaacagataaacagtttaaagcggctttaaaagatgcaggactaactcaatcacaattaaagtctgagctggctgacagcattaaatatcagcagtacgtagataaagacattcaaacaccagaagtaacagataaagaaattcaagattattacgatcaatttgcaaaacaaagccaaagtcaagcaagcggcggtaaagaacaatctcaaatgccaaagcttgaagacgtaaagccacaaattaagcagcagcttgaacaacaaaagaaacaagaagcattggagaaaaaagttgaagaacttaagaaaaatgcaaaagttgaagtgaagctttaaatacaaatgaaacggccctttaaagggccgtttttcgttatgtacatttattgcttcttgtcagtaaaaaggggtgcgtgaaagattttattgtattttgacttataagataaaaagtgttctgatggtttgcctttcatcctatactcttcttatatagatacaagagaaattgggggagtcgataaatgaaaaaggtggctgttttttttgttgggcttgtttttttactcgcggggatgggtctgacaggcaatgcgtctgcggcgtcaaatcaacttattattattaacaaatctactaacacccttgctttttatgatggaggaaaattagtcaggacgttcaaagttgcgacagggaggcagatgagttatacaccagagggtacctttagcattgtgaataaaattaaaaaccggccttattataaagacaacattcggggaggagatcctaggaatccgctaggtgatcgctggctaggattaaatgcgcgcggaacatatggaacgacgtatgctattcatggaaataataatccaagttctatcgggacttacgcaagttcagggtgcattcgtatgtatgatgaagaggtacgctggctgtttgaccgcgttcaaaccggtacaaaagtggttattggtcaatttcattctcaaagttttgattcaatcgctgttaaaaacaaatacaaagtaagcagtgctccagtggcccagaatctttgtaaaacgaaaaagctctcaaaaggccaaattggttttgtaacgattcaatcaccgatggttttgttaaaagaagaaaaaggaaaatggataaagattcgtacgttaaatcgcggggaacgctataatgtatataaaataaatggcattaaagtctctttagggccaggatttattgaaaattatcccaataaaaaaccatccataaaattagatatttgcaaatagaaaatgaggctgaaacaaaagtattttagcctaagtgaaaaacgaaccattgatcaacatgtttgattcatggttcgtttttttattatggtgaacgtagatttcatccgttttgttccttctagcagttgcacggaaatcaacagcggtgtcacaagctattcatacgagctaatgcatccatttgttcgtctttagattgtatttatttctttatgtctcaacctcattttttgaatttttaataatgtttattataataaaaaatagggaaactaattgcctaatgaagagagagaaagggttgttttagcgtatgtctacaatagatttatcaaaatttgagaaaaaaatgattattcgtaacatcaaatcggacgatatagatgaaattttagcacttcaaaagctatcattccccggaatggatccgtggaaaaaagaacagcttgaaagtcatctggccatttttccagaaggacaaatatgtgcagagtacgacggggaaattatcggatcttgttcaagcttgattgtgaactttgatgagtacgatgatcagcatacgtgggacgatattacagacgaaggatacattacaaatcataacccggaaggctacaatctgtatggaattgaagtaatggttcatccaaagtatcgcggcatgaaaataggacgccgcttatatgaagcgcgtaaagatttagcacgtgaattgaacctgaaaagtatcatcatcggaggaagaattcctaattaccataagcattcagctgaaatgtcgcccagagagtatgtagagcaagttattcatcataaaatttatgatccagtgctatcttttcagctaatgaacggatttacgcttatgcgtataaaccctggttatcttcctgatgatctagcttctaataagtatgcaactttgatggaatggaacaacgtagattacgttcgccgctcaaaacgccattttaaaacatcattcccagtgcgtatttgtgttgttcagtatatgatgaaacagatcaattcatttgaagagtttgcaacacaggtagaatattatacagatgttgcttatgatgcaaaagccgacttctgcgtattcccggaaattttcaccactcagctaatgtctttcttgaatgaaaagattccaagcaaagcggttcagcgcgtagcagaatatacggaagagtacattgagctattcactaacttagcggttaaatataacgtaaatattattggaggatcccacttcgttgaagaagataatggagatatttttaatattgcctatctattccgccgagatggaacaattgaaaagcagtacaaagtgcatattacacctaatgaaagaaaatggtggggaattagtccaggagataaagttgaagtgtttgatacagattgcggtaaaattgcgatccaaatttgctatgatattgaatttccggagcttgctcgtattgctacagataaaggtgcaaatatcatttttacaccattctgtacggaagaccgtcaaggctatctccgcgtaagatactgctctcaggcgcgcgcaatcgaaaaccaaatttatacggttatcgcaggtacagttggaaacctgcctgaaacagaaaacatggacattcagtacgctcagtctgctatttttgcaccttctgactttgaatttgcacgagacggcattgtaggagaatgtaatcctaatattgaaatggtagttattggagacgtagatttagaaattcttcgccgccagcgtcaatcaggaacggttcgtcaattaaaagaccgacgccatgacgtttacaatattaaatataaaaaataacgtattttctaaaaacatcatgcaaatgcatggtgttttttatttcaacttttgccataataaaaactattataatgaattttgtggactaaccatggaaaagaggggaaaacatgagttttcatggacaatcggtattacccgctgttcgagatatgaagcaattggaaaagtttttagtaagtaattatgagtacggagttcttttagacaatcaagtaggcatgctaaaaggaattatgaaagaggtccataagcatgaaaagaagctaattattcatttagatttaattcatggcttaaagcacgatgagtatgcggttgattttttgtgtcaggagtttaagcctgcaggaattatttcgacaagaacaaacgtcattttaaaagctaaacaaagagggatttatgccattcaacgggtctttttattagatagcacggctttgaagaaaagctacgagttaatgaagaaagtaaaacccgattatattgagcttcttcctggaatagtgcccactttaatccaagaagtcaaagctgaaacaggcattccagtgttagctggaggtttaatacgaaccgaaaaagaagttcgaaatgctttaggagccggggcttccgctgttacaacatcaaatagagaactgtggagtatttcaacttaaaaaaattgtttgacaacgctttcatcatctagtaaacttctagataagttaatagatgtgagggagaataggagatccacggtatagccttttaatgattttattagggggatgtattgtggattttcttattttcttgttattttaatcgttttcatacaaaggggaggttatttatatgcaagcattcttaggagaaataattggaacaatgattttaattatccttggcgctggtgtatgtgcgggcgtcaatttaaaaaaatcgtttgctgctaattcaggatggatcgttatcacaatgggatggggaatggcagtagcaatggcagcatatgcggttggtaatatgagtggggcacacttaaatccagcgttaaccgtagcgcttgctattacaggggattttccgtggtcacaagtaccaatgtacattttagctcagtttattggagccattcttggtgcaacagttgtatatttacactatcttccacactggaaagaaacaaaagatgctggtacaaaattaggtgtattcgcaacggggccagcaattgctaacccatttgcaaacgttttaagtgaggcaattggaacgtttgtattagtagtaggaatcctagcaattggagcaaataaatttacagatggattaaatcctttagtagtaggatttttaattgtaagtatcggtttatcattaggaggaacaacaggctatgccatcaacccggctcgtgatttaggacctcgtattgctcatgctatcttgccgatacctggcaaaggcagctcgaactggaaatatgcttgggtgccagtagtgggtcctttagtaggcggatcaatcggggcagtattttaccaagcggcatttttaaataaaatgtcaagcagcttatgggttgttttaagtctagccctgattgttttagcagttatctacgctgtttctaaacaaaaggcagcacagattcaatcagcagtagtaccgaaaaaatgaatgcgctttaccatctaactatgtacaataaagaaacgacactatacagagaataggggatattgatatggaaaaatttattttatctttagaccaaggaacaacaagctcacgagcaatgttatttaataaaaaaggtgaagttgtacatgtagctcaaaaagagtttacacagtactttccaaaaccaggttgggtagagcataatgcaagtgaaatttggggttctatcctagcagttatcgcatcttgtttatctgagtcaggtgttcatgcggatcaaatcgaaggaattgggattaccaatcagcgtgaaacagcagtagtatgggaaaaagcaacagggaagccggtgtacaacgcaattgtatggcagtctagacaaacgtctggtatttgtgaagaattaaaagcaaaaggattaaatgatacgttccgcgacaaaacgggattattaattgatgcatacttctctggaacaaaagtgaagtggattttagataacgtagaaggtgcacgtgaaaaagcagaaaacggtgaattgttattcggaacaattgatacatggttaatttggaagctatcaggcggaaaggcgcatgtaacggattactcaaacgcatcccgcacgcttatgttcaatatctacgatttaaaatgggatgatgaactgctagatatcttaggggtaccgaaatccatgcttccagaagtaaagccttcttctgaagtctacgctcatacagtagattatcatttctttggtaaaaatattccaattgctggagcagcaggggatcagcaagccgctttatttggacaagcgtgctatgaaaaaggaatggcgaaaaacacgtatggaacaggctgctttatgctcatgaatacgggtgaaaaagcagttaagtccgatcacggtttgttaactacattagcatgggggattaacggcaaagtagaatatgcgcttgaaggcagtatttttgtagcaggatctgctattcagtggcttcgcgacggtttaagaatgtttaaaaatgcggctgaaactgaaaactatgcaacgcgcgtagagtctacagacggcgtatatattgtgccagctttcgtaggacttggaacgccatattgggatagcgatgtacggggggcgatgtttggattaactcgcggtacaaaaaaagaacactttattcgtgcaacgcttgaatcattagcttatcaaacaagagatgtattaagcgcgatggaagcggactctggaattacattaaaaacattgcgtgtggacggaggagcagttaagaataatttcttaatgcagttccaaagtgatgtgttaaacgttccggttgagcgtcctcaagtgaatgaaacaaccgctcttggggcagcatatttagcgggtcttgcggtcggctactggaaagattgcgatgaaattgcgcagcagtggaatatggaaaaatcttttgaaccaaatatggaagaagaaaagcgtgaagaattatatagcggctggaaaaaagccgtacatgcaacaatggcttttaaataattatttgatgaaaaccctttaattaaaagtgcatgtatgatataatttactcaagttaataaattggttggagaatcggagagaccacagatccatatgtaggcatactatatatgtgatttgtggtctctctttttgtatattgggaaattttgatatctttaaaaaatgaaaggggaatgacgtatgttttcaagtcaaacacgttcgaataaattggtagacatgacacaaaatcaatatgatttactagtaattggtgggggaattactgggtcaggtattgcacttgatgcgactcatcgaggcatgaaaacagcattagttgaaatgcaggatttcgcagcaggaacatctagtcgttcaacgaagcttgttcacggcggtctacgctatttaaaacagtttgaagttaaaatggtagccgaagttggtaaagaacgtgccatcgtatatgaaaatggccctcatgtaacgactccggagtggatgctgttacctttccatacgggtggaacattcggtaaattctcaacttcaattggactgcgcgtatatgattttttagctggtgtaaaacgctcagagcgccgcaaaatgtttagcgcagaagaaactcttagccgtgagccattggtgaaatctaaagatttaaaaggcggcggttactacgttgaatataaaacagatgatgcacgtttaacgattgaagtagctaaagaagctgcagcaagaggagcagacttagtcaattacacaaaagtggaaaacttcatctacgataaaggaaaagtagtaggggctgttgttcgtgatcagcttacgaataaagaatataatatctatgcgaaaaaaatcgttaacgctgcaggtccatgggtggacacgctgcgtgaaaaagataattcaaaaaaaggcaagcagcttcaattaacaaaagggattcacttagttattgatcaagagcgctttccgttaaagcaagccatttattttgatacacctgatggacgtatggtatttgcgattccgcgtgatggaaaaacatacgtaggcacaacggacacggtctataaagaggacgctagacatccgcgtatgactgtaaaagaccgtcaatatgttattgatgcgattaactatatgttcccaacggttgatattacagtagacgacgtagaatcaagctgggcgggggttcgtccacttattcacgaacaaggaaaagatccttctgaaatctcgcgtaaagatgaaatctggacatcagaatcaggtttaattacaatcgctggagggaaattaactgggtatcgtaaaatggctgaaattgtcgtaaatcgtgtagctgaagattttaaagcagaaggacgcgaatttgaaagctgtcaaactaaacatttaccgatttctggaggtaatgtaggcggttcaggtgggttcccaacgtttgtagagcaaaaagtcaaagaaggcatcaaactagggttatcacgtgacgctgctgaaaagcttgtaaaacgctatggctcaaacgtagataaagtataccgctacatgattgaacgtcccgatcagctaaaaaacagcgaccttccagctagtgtatttttgcaaattcaatatggcatagaagaagaaatggtttcaaaaccagtggacttcttcattagacgtacgggcgctttattctttgatatcaactgggtaagaagctggaaaaaacaagtgattgctcatatggccgaagagttaaagtggacgcctgagcaaacaaaagcttatacggatgaattagaacagcaccttcatgacgcagttgtaccagtagatgaaaaagttaaccgtatgacaggtatttcatgataaaataaaaaagtacctcaaaatttgtcaatacagccataatataatagcaggaagtcaaattttgacgaagaaatataatatgactgttaaaaaaagagaaagacgattactcgtttttctcttttcatacatatttacatctatataagggggctttttttatgagttggaaagaaacgtatacatcttggattaattatcaaaatttagatcctgaattacgtcaaaatttagacgcaatcaaaggtgatgaaaaacaattagaagatagtttttacaaaacgttggagtttggaacaggcggaatgcgtggggaaattggagcgggtacaaaccgtatgaatacgtatacaatccgaaaagcttccgagggctttgctgagtacattaaacaagctggcgaagaagctattaaccaaggagtagtcattgcgtatgattctcgccacaaatcgcctgaatttgcaatggaagcagcaaaaacattagcaagtcacggaattaaaacgtatgtatttgaagagctaagaccaacacctgaactttcatttgcagtgcgtgagttaaacgcatttggaggtattgttattacagcgagccacaatcctcctgaatataacggatacaaagtatatggcccagacggtggtcagctgccgccaaaagaagctgatgaactagttgactttgtaaatgctgtggaaaatgaacttacattagctgttcaatctgaagcggagctaaaagaaaaaggtcttattgaaatgattggttcagcgattgacgaagcatacaatgagaaactaaaaacgattttaattaatccagagctagcttctgaaacaggtaaagatttaaaagtggtttttacacctctacatggtacagctaataagccagttcgcaacgcgcttcaatccatcggttacgaaaatgtcacggtgattgaagaacaagaacttcctgatccaaatttctcgacggttaaatctccgaatcctgaagaaccggctgcatttgaatatgctgttcgtaaaggtaaagaaattgatgcagatatcttaatcgcaacggatccagatgcagaccgcttaggaattgctgtcaaagatccaagcggcgaatatgcgttattaacaggaaaccaaacgggtgctttattgcttcactatttgctttctcaaaagaaagaaaaaggcgtgctgcctgctaatggtgttgtgttaaaaacgattgtaacgtcagaaattggtgcacaaattgctcgttcatttggactgcaagttgttgacactctaacaggttttaaatttatcggtgaaaaaattaagcaatatgagcaaacgggcgagtatacattccaattcggttatgaagaaagctacggctatttaattggtgactttgctcgtgacaaagacgctgtacaagcagccattctagcagtagaagcttgtgcttattataaaaagcagggcatgacgctatatgaagcgctacagcaagtgtttactaaatatggtttctatcgtgaaggtctgaaatctttaacgcttaaaggaaaagaaggatctgagcaaattcagcatattttggctacatttagaaatgaacctccaactgacattgcaggattaaatgtttcggttgtagaggattatacattaagtgagcgtcagcatattaaagcaggaaaagtagaagaaattacattaccaaaatcaaatgtattaaaatatatcttagaagacggttcttggttttgccttcgtccgtctggtacagagccaaaggtgaagttctattttggcgtcgtttcagaagatgaggcaacaagcattgctcatttagaagctgtacaaacagctgtaatgggtgaagtagaacgtgtattagataaagtgaaaacggtataaaagtaaagcctgctcaaacttgagcaggcttcttttatgatactttatttgattgcgtatttgacaaatacgaagaagatcgtagggctttataaattttcggagcaagcatagccccaagaacagtaaaaataagatcctttaccgcaaaccacgacataatcttccaagcggctgcatatgtcattgcaggagcttcaagccagtaattaaccgctacatacatatacgtagtacctattaaataaataacggcaataccaactagtgatgaaattaaaaagatagaaaaagttggcttgccgcgcatctccataatttttcctgtgataaatgctgctatgatataagaaagcaaaaagccgccggtgcttccaaataaaataccaattcctgctttaaattgagcaaataccggggcgccggcaatgccaattaatacgtatacaatcatcgaaatagaacccattctgctcccaagtaaaagtcctgctaatataacaaaaaaaggctgaagtgaaagaggcacgccgcctacttgtaaaaaaggtgcccaagaagtaatgtttgcaccaatagccataagagccgcaaacataccggctagcgttaaatctaatgtgcgaaaccttttattagtactcatatatgttcctcccagtatgtactgaaatatcttagcgtatgtactgaaaattgtacgtcgaattcacttttatgtcaacgataaaaataaatatgtttacatatatcatttgatgttttttgaaataaagtatgcatatttttagtgcaacataaaaaaataaagaagggaattcatcccttctttgtccaagtgtgtgtatcaaaaatactagtacaatgattcttccagaagctccgggttgtgctccgaatattccgttgcatgatcaatgtagcgtagtaaagaataaagctcttcttgaatgatgcggtagtttcgttcaaaattgtaggcgtgcaaaaaatgttcaatcttttttgaaagaaaatcgtcgtctgttcgaaccattaaaattaataagttatcccattgtgaacggtgtgtgtaatataaagctcgatcataatcaattacatccattaataacgttcctccttttgaggagttgaaattagtgtatgatatttgcgggaattcttacgctgtaaatgttgggcaaaagaccagtgcataattaaaagaggttgtagtcattatgcaagaagaataaacgtacaggaccggataaatgataagaaaggcaaagaatgatgcagtataacagttatattacatccattatttaagacaactaaataaaaatccccttttcttgaaaaaataaagcttctttttgatgaaaacacatgaattgacatgtttgtacatagattgaagtaaggagtgaaagggggagctgtcgtgaaagaagcagattataagcaattataccgtgcgattgatgaaattacggaaatagctagcggtttcggcttagatttttatccgatgcgctatgaaatttgcccggcagatattatttatacgtttggtgcatatgggatgccaactcgtttttcacattggagctttggaaaacaattttacaaaatgaaattacactacgatcttggattgagtaaaatttatgaattagttatcaattcagatccttgttatgcatttttattggattccaatgcgcttattcagaataaattaattgtagctcacgtgttagcccactgtgacttctttaaaaataacagccgttttgccaacactaaacgggatatggtagaaagtatggcagcgaccgctgatcgaattaaagaatacgaagtaaagcacggtaagcgtgaagtagaaaaatttttggatgctgttctatcgattcaggaacatattgatccgtcccttatgcgtgccaagctttcttggagcatagatgatgtagaatcatcggaagaagaaatcatttctccttacgatgatttatggaatttggattataaagaaaagaaaaaaccaaaacctccaaagtcttttaaaaaatttccgcctcagcctgaaaaagacatcttattatttatcgaagaatacagcccttatttagaggattggcagcgagatattttaacgatgatgcgagaagaaatgctttatttctggccgcagcttgaaacaaaaattatgaatgaaggctgggcttctttctggcatcagcgcattattcgagaaatggacttaacgagtgatgaagcgatagaattcgccaagctaaatgcaggggttgtgcagccgtctaagacgggaatcaatccatattatttaggtttaaaaatctttgaagacattgaagaacgctacaataatccaacagaagatatgattcgccggggcgtggagccgggttcaggaagagagaagatgtttgaggtacgtgaggttgaatcagatatttcctttattcgcaattacttaacaaaagatttagtcatgcgggaggatatgtacttattccaaaaacaaggaaaagactataaaatcgtcgacaaagagtggacagaagttagagatcagcttgttaatatgcgcgtaaacggcggatttccttatatcacagtaaccaatggagactatttaaaaaatggcgagctctatttaaaacactggtatgaaggaattgaattagatgtcaaatacttagaaaaagtggtaccgtacgttcatcagctttggggccgccccgttcatttagaaacgataatggaaggcaagccaatcgcctttacgtatgatggaaaaacagtgcatagaaaacatttgtaaaaagaagaccgcttaaacagcggtctttttgggcttctgtaacttatccatataaattgaaaaaataaaattactatgcaataatcgaatgagaattactttcatttagaaaggaagataagatgtttgttgtaaacgcaacttttgaaacagaaaagaaatttgaagaacagctcaagcaaaaagctaagaaaaacaaaatagaaattgaggcagccaaaggaaatttatcgttcgaatgctggaaaaaagattccgcagataaagttgaatatgtctttgtatccaagtgggaagacaagcagttctttcaagcgtggatctcaagagaagaacatgtgaacgaacataaagaagcgaataaaaagaaaacgaaagcatgtactgaagctatggaaatcaagaaaacgctgcgcttttatgaggcggtagaagaggacattctttcctaaaaaagcatgcttgactttcataaatgttgtaactataatgattacaacaaaataggagtgagagcaatgaaaattagcagtcgattcaccgtggccgttcacatactatctttaattaaattagatagcagtcatcctagtacttcagagtggattgctagcagtgtaaatacaaatcctgttgttataagacgagtaattgggatgttaaagaaagctggactcgtgggtgtaaaagccggagctggcggagcttatctattgaaagatctagaggagataacgttgttagacgtttatcgagcggtggcggcagtggaagaaggagaattgtttcaaatgcatgaaaatccgaatgtggagtgtcctgtaggagccaatattcaaagtgtccttgaattgattttaaaacgttctcaagatgccatggaacaagtcttagctgatgtgaccatgaaagaattagtgacggatttaatagtaaaaatagatgcataataacatgcttctgttcgtaaaaaacggagaaacctaggtttctccgtttttttatagcttcacaattgttcgtccccgagcttgttcttttaataaagtcggaagtacctcagggagctgttgtagtgaaatttcctgctgaatgaaaggttcgaagctttcaggcttaaagtcattagcgagtctattccaaatctcttttcgagtaggcattggacagtaaacagaatcgatacctaataaattaatccctcttaaaatgaagggaaagacggttgttggcactttgcctccagctgttagcccgctgacagctacagagcctccgtactgaatttgactgagaacagaagctagaggctctccgcctacaggatccaccgcagcggcccatttttgcttgcctaatgcttttaatttgccgttaaaaacgtcttcacgcgctacaatagaggaagcgccaagctttttcaaataagctgcttccgagctttttcccgtacttgcttccactgtgtagcctaattttgaaagaatggcaaccgcaaagcttcctacacctcccgtagcgcctgttacaagcacagagccattagatggactagtatggttttcctctaagcgatgcacagataaagcagctgtaaagccagctgttccgataatcattgcttcttttaacgttaaattttcagggagagggacaatccattcgctgcgtatgcgcgcatactcactatagcctccaaagtgtgatacgccaatgtcatagcttgttgcgatgacatgatcaccttctttaaaatcagggctgtcagaagatacaacgacgcctgctaggtcgattcctgggacaaatgggtagcttgtcacaatattgccgtttgcgatgctggctaagctatctttataattcactcctgaataatgaacgcgaataagtacatcgccttctggcaaatcgtttagcgtcagtttttggacggacgcctccacttggtcttcactttttttatctactattaatgctgaaaatgattgctccattttatttctcctttctatactgggatgtatacatctatacatagattaccttatttctatacccattatagaaaatagtaaaagaagttcctaataatttgattacgaaagagatcatttcattataaaatagcggtatagctattagttagcaatacatagaaaagaggagaagggaaatgagcacgaatgtatattttaaccatgatgcaggcatcgatgatttagtatcgctttttttactgctgcaaatggatgatgtaaaagtaacgggagtatctgtcattcccgctgacggatatctagagccaggtatcagcgcaagccaaaagattattgatcgttttggaagttatgatatcgaggtcgctaaatctacttcacgcggtatgaatccatttccaaaggagtggcgcatgcatacgttttatgtagatgcactgccgattttaaatgaaaaaggggaagtacaaacaaaaataagtcagctccctgcccatgatcatttaatcgagacattgcagcacacagccgggaaaacaactttattgtttacaggaccgttaacagatttagcaagagcattggaaaaaatgccggaaatagaagagaaaattgacaagttagtatggatgggcggtacatttcaagaggtaggaaacgtgcaagagcccgaacacgatggaacggcggagtggaatgctttttgggatccagaagcagtagcgaaagtatgggaaagcaaaattaaaattgagatggttgctttagaaagcacgaatcaagttcctttaacaccggctattcgtcaaatgtgggcttcacttcgaagatatgaaggagtagactttgtagggcagtgctacgcggcctgcccgccgcttgtgcatattgaaaccaattcaacatattatttgtgggatgtactcacaacagcatttacagggaattcaacgcttgtgaaggtgaaaaccgtttcgagtattgtgcatacagaaacaccaagccaaggaagaacagaaatttctgaagaagggcgacctgtagatgtcgtatatgatgtcacagctgaatcattctttacgtacattacagatttaatgaaaaaagcagtagccaaataaagaaaaaggttgcacgtgaaaatgtgcaacctttttaatgaatcatatttaaaaattgacgtgtacgctcttgttgaggatttgaaaatatttgatccggtgtacctctttccataatgacgccttggtccataaaaataacttcatctgctacttcacgggcaaagcgcatttcatgagttaccaccaccatcgtcattccttcttttgccaagtctttcatcgcttgaagaacgtctcctacaagctcaggatcaagagctgaagtaggctcatcaaacagcataacttttgggtccatcgccattgctctggcgatgccaacacgctgttgttgtccgccagacagctggaaaggataaaagtcgagcttatctcctaagccaactcgtgttaataattctttccctcttttttctgcttcttgagtggaaacaccttttacaattacaggcccttccataacattttcaagcgcacttttatgaggaaacaagttatagttttgaaagaccatacctgttagacttcgaaatgaagtaatgtcttttttacgaacaggcttggtgaaattcatgctttttttatcaagttcaatcgtgccgtctgttgggatttctaaaaggtttaagcaacgtaaaaaagtagttttacccgatccagaaggaccgattaatacaattaccttgccctgttcaacttctaaatcaatcccttttaatacttgcaaatcaccgaatgatttatgcaaatttttgatattaatcatataaaaaactcctttagctactcgaaacggttatttagatacgtaacgatctagtcttatttcaatgcgtccttgaataatggataagattgtacacataatccagtacaagagcgctgcttcactataaagaagtaaaaattcatagttagtcgaagcaatttcttgagctttacggaacatctcagaaacaagaataagcgatgcaagtgacgtatctttaataaggctaataaaagagttagataatggcggaatcgatacacgtgctgcttgcggtaaaataatccgtcttaacgcttgggaataggtcataccaagtgagtaaccagcttcccactgtcctttaggaatagattgaatcgctgctcggataatttcagatgcatacgcacctacacttaatgaaaatccaataacagcagagataaatgggtcaattgttatatctaaattgggtaagccgtagaaaataataaataattgcacaagcagcggtgtacctcgaataatcgatacatagatgcgcgcaattatatttaaaacttttatagatgataaacgagccaaggctgttaagacagctaaaatgataccgagtacaaacgtgattaatgttagtggaatagaatattgaatagctccctttagcattggtaagagagatgattgagcgattgaaatcaattgattcaatcgctctccatcaggaaaaatattatttaggagaaacatcttcgccaaaccatttcttagaaatctttgcgtatgttccgtcttttttcatatctttcaatgctttgtttacttcatccactaacttaccgctgtcttttctaaacataaagccgcttgcagcaccatcggatttttcatccgcgattttgataggtgcgttagggtgctttttcttatagtcaaggaacgataatttatcgttgattgtagcatcaacacggtttgcgctcattagttctactgcttgagcaaaaccttcagcactcgtaatgtttgcaccataagattgagccatgtctttgtagttacttgttaatgactgcgctgatttttttccttttaaatctttaaatgatttgatatctttttcgtctttacgaacaattaatacagcgcctgactggatgtatggatcagagaaatcgtatttcttttgacgatcttcacgaatacccacttcgttagcaatcatgtcaaagcgtttagcatctaatccggcaaacatgccatcccactgtgtttctttgaactcagcttttacgccaagacgtttagctacttcttgagccaattctacatcaaacccagttagcttttgtttgtcatcatgaaaagtgaacggagggtatgtaccttcagttccaattgttaatacgccatcttttttcactttattatataaatcctcttgtgaagatttattgtctccattgtttgcttcattttttgagctagaaccgcatgcggcaagcacaactgtgaaagctaatagtagcgacaaaagtgcagcaaatttcttcattttctaaaccccctagtattctgataggaaatgatactctgtgatactaaacaagaacacagcaaaagtcaacaaaaaaaacttatacgattaatgtgacttaaaataagggaaatataccttctatacacggtttgtcataaggatacagaaagattttaaaatttggattaagtggatttttaagggagatttgaggagtaaaaaggaagtttcatgcgacgattttctctttcattttttcatgacttttggtgcaataaacatatagttgaatgttaaggtagaaataaattccttatggtacacttaaagaagaatttatgaaacggagcgatatgatgaaagccataaacttaatctcaattgcctttggtgctatcgctggtacatatgcacgttatttgctgaatctttccttattatatgcgggctacccaataggaacggtaattgaaaacctattaggaagcttcatactaggcctattaacaggattttttgtgtggaaaaagccaaaagaatggataaagcttggactaggagttggcgtatgcggcggttttacaacgtattcaacgtttgcaggagacgtcatttctctcactcagcgccatttattttggggagccatttatgtaatggtctctttagtaggtggaatccttcttgctttagcaggctatctatgcggtgaagcggcagggaaaaatttagtgaaagtacatgaggtgaagtaaatgagcatagtgagcttggcacttggcggggcagctggaggaatatgccgttatcttttgggtttaaaagttacaaaaacagtttcaaaccctctttttccagtatcaatgctgtttgtaaacttgctcggtgcgtttgggcttggtcttttttacggtagttattatggaaaggttccgagtcatgcttatgatgattcaatatttttaatgattggcattgggttttttggtgcctttaccactttttcaacgttcagtgtggaaaccgtacagttaattcgagaaaaatcttatcggaaaatgctggcgtacgtggggatttcagcatttggaacagttggtttatttacagtcggtttactggcaggaacatttttatttaagtaaagagaacgtttctagtagggaaaaacaaaaagacggagaagtagagaatggatagaaaagcagaagtttggaaatacattttgttgattgtagctgttgcaggtcagatcatcggttttttatttttatttataaatgttgtggcggcatttattttttacggtttttatattctaacttttattatgttactcctgctgtttatatgggatcggaaaaaggaaaaagacaaggaagaatttgacgactataccgattactaatcatataaaaagcagaatgatgcggtgcgccggacctcttacttagtaaagaagcataaaagatacatctataaaaggaagagagccgtaagagcataaagagatattgtatttacatctagttgtgttataattttaagtgcgaaaacaaaatcaataaatagcaatcactaggggagctttttgaagctgagacgaatgtatttcggaccctttgaacctgatctggtttggaccagcgtagggaagtggcgatcatgtttacataacgatgcatgctaaccactctacgttgtagagtggttttttgtatgtaataaagccctctacacaagatgaggtgattgaaatttctctttattctgaatggaaaggtttcgatcatgtggatattcctaaatttcatgtcattacaacagataagcagccaatcgaagagcttcaaaaagttttaacggctatcgcgccttttacgggcgccgttcatattagagaaaaagagaaaacggcaaagcagattcaatgtttactagaaagcttgccattttgtcgctctaaaattattgtgaatgaccgagttgatgtagcgcatgctttaaaagtaaaaggcgtacagcttgcttatcatagtttagacgtttcgattgttatagacgcatttccttctcttattgtcggaaaatcagttcactctgtggaagaggctttagaagctgaaaaagatggtgctcactacattctatacggacatatttattcaacacattcaaaaaaaggattaaaaagtcgaggggtagcagcactaaaagaagtagtagatgctgtgcagataccggttattgccattggaggaattacacctgtaaatgccaaagaggtgcttcaaacaggagcacacggtatagctgtgatgtctggtgtcatgcttgcgcaagatcccctcaaagcgattaaacaatattctcatatatggacatctggaggtggagaaaatgaagcagcattatgatgtactgttaatcggaggaggtataatcagctcttctatcgcttatcatttgtcaaaacaaggagcgtcagtagctattcttgaacgcaatcaaattggttgtgaagcttcaagtgcagccgctggtattttaggtgctcaagctgaaattgatgaagaaggtcctcttttagaccttgctattaagagcagaagcatgtttcctgaactggtgaaggaactaaaagaaaaaacggccatcgacgtagagctcattcaaaaaggcttattaaaagttgctgtaacagaagaagatgcacacgtattaaagaaaaaagccgctcagcaccacgggtgggatgaacatgtaagatggatcgatgtaaaagaagcgcgtttgttagaacccgggctctctccagacatatacggagccattacaataccgggagacggccagctagctccggctaagttaacgcaagctcttgctcatggagccttgtatcacggagcagatgtattcgaatactgtgacgttcattctcttattatggaaagtgaaacagtaaaaggtgtacagacgtccaaaggctctttttatggagaaaaagtagttatcgcagcaggctcatgggctaaacgctttatttcttctgaacatttaggtcacgtgtttcccgtaaaaggggagtgtattgctcttcgaagtcataagccgctgctttctaaaacgatttttttagatgaaggtttttacttagtgcctaagactggtggaagaatcgtaatcggggcaactaagttacagcatgactttaccaagacggtttctgcacaaggtattcaatttttgctgaataaagcttcggcgcttctgccagctattaaagaagccacatttgaaaaagcatgggctggtcttcgtccgcaaacaaatgatggctggccttatttaggagagcatcctgaaatagcgaatctacacatggcgtttggccactaccgaaacggtattttattaagtgctgcaactggaaaaattatggctgatgctttgttagggaaaaagccgaatcattcattttttacatcatttcagctaacaagagtaatggagggagttcattgaatctaatcattaatggtaagaccgttacttttggagatgaaattgaaacggtcgagcacttgttgcaggctcagaacctgcatgaacgagtggtaattgttgagctaaacaagaacattttgcaaaaagaagaacatagcgatgcatgcttaaaagatggcgatatattagaagttgtttcatttgtcggaggaggatgaagagtatgttaaaaattggacaatatacatttaattcacgtttattattagggacagggaaatttcctgactttacgactcagcgtcaagcggtagaagagtcagaaacagaagttttaacatttgctgtgagacgaatggatatttttgatcaaaatcaacctaatttattagaagcgcttgatgtgaagcgtttcactcttttgcctaacactgctggagcaaaaaatgcagaagaggccgtacgtattgctaaattagcaaaggcttctggactttgtgacatggtaaaagtagaagtaattggatgtgataaaacgctgcttcctgatccagttgaaacattaaaagccagtgaagaactgttaaaagagggctttaccgttttaccttacacatcagatgatgttttacttgcacgtcgtttagaggagttaggcgtacatgccattatgccaggagcttcgcctatcggttcaggtcaaggtattattaatccgttgaacatgcgttttatcattgaacaatcaactgttccagtaattgtagatgcaggtattggaacggcttcagacgcagctcaagctatggagctaggagcagatggtgtgttattaaatacagctgtttcaggagcaaaagatcctgtgaaaatggctcgtgctatgaagctagcgattgaagcaggacgagcagcatttgaagcaggacgtattgaaaagaaacaatatgcaacggcaagcagtccaacagaagggatgagtatcggttgattaatcgttattcccgccaagaattgtttcaacctattggaaaaggcggacagcagcaaattcaagaaaagcatgttctgattgtaggagcaggtgctcttggaacagggaacgcggaggcacttgcgcgagcgggggtaaagaaaataacgctcattgaccgggactatgtagagtggagcaaccttcagcggcagcaattgtatagtgaaaaagatgctgataaaagaattccaaaagcaattgccgctaaaaaacggcttcacgatattaatcacgatgtaaaagtagaagcgcacgtagcagacggtacccctcaagttttagaacagcttgttgagggggtagatgttatgatagatgcaaccgataattttgacacacgccttgtaatgaatgatttatcacaaaaatatgatattccttggatttacggagcatgtgtaggaagttatggaattagttatactatcataccaagtgaaacaccatgtttatcctgtttgcttgaatctgtaccgcttggagggttaacatgtgatacagtggggattattagtcctgctgtccaaatggtagtcgctcatcaagtaacagaagtgttaaaaatattagtcggagactggaatgcgctcaggagggaacttgtttcgtttgacgtatggaaaaatgagtatacgagcatcaatgtgaacgtgtttcgcaaatctgcttgccgctcatgcggcagtgaacaaacctatccctttttacaatatgaaaatcaaacgaaaacagctgtgttatgcggaagaaacacggtacaaatccgtccgggcaaatcagccaagcagccgctgcagtctttaggtgaacgattaaaagaaaaaggatataaaattgaacagaatccgtatctgctttctttttatgtagatgattaccgtttagttatgtttcaagatgggcgcgtctttgtccatggaacaaacgatatagtagaagcaaagtcactttatcatcggtatattgggtaagaaagagatggaggtttcaagcatgacagtaccaaaagcattaaccattgctggatcagacagcggtggaggagcaggtattcaagcagatttaaaaacatttcaagagcgtgacgtttttggcatgtctgttattacagctgtgaccgcacaaaatacagttggcgttcaaggagtttatcctttagaagtagaagcagttgaaacgcagttagattcaattgccactgacttatttcctaatgcagtgaagacaggtatgttgttcagtgctgatattatttacgcagtggctcgtaaaatcaaacagtacggactgcaaaatgttgtagtggatcccgttatgattgcaaaaggcggtcagtctcttcttcaaagagaagccgtacaggctctaaaagaattattgcctctttgtgaagtcattacgccgaacataccggaggcggaagtcatcacgggtaaagaaattcacacgatcgaagaccgaaaagaagcggcaaaacagattcatgagctaggtgtaaagcacgtggtaattaaaggcggacatgatcaatctcatcaagatatgattgatatagtgtatgatggtcataagtacgttgaaatcacacatgaaaagatgaatacaaagcatacacatggaacgggatgcacgtttgctgcttgcgtcacagctgaactagcgaaaggcaaaagcgtggttgaagcagttcaaactgcctcggattttgttcactatgcgattaagcacacacttgaaattggttccggacacggtcctactaatcactgggcgtatggaaaatactttcgttcaaacatataaaaaaacgtgcctacaatctaggcacgttttttatgaagaaggaatatgggtaggaatctctccatcgatgcctaaataataatgtctaaggggctttaaattatcatcaagctcataaacaagcggcacgcttgtaggaatattcaagttcgcaatgccatcaggcgaaatgttatccaagtactgcatcagagccctaatcgtattaccgtgagcggaaataataacctttttgccagctttaatagaaggagcaatagtttcgtcccagtattctagaacccgcttttctgtatcggctaagttttccgttacaggaaattgtcccttagctaattccttatacttagggttggaagcttcatagcgaatatctgttgtctctaaagcaggagggcgttcgttcatcgaccttctccacaaatgcacttgctcttctccaaatttttttgcggtttcttctttgttcaaaccttgaagagccccgtagtgccgttcattcagcctccaagatttatacacgggaatccacatgaagtccatttgatgtaagacaatccatagagtgcgaatggatcgttttaaaacagaagtataggcaatatcaaaagtatattcgtttttctttagtacttttccagcttctcgcgcttcttgcaatccatttttagaaagatctacatccgtccagcctgtaaatttattttcaagattccacacgctttgtccgtgccgaatcaacacaagttttatcatcgtgttctcctttcaacagtgactaaggactctattcttttttattatgagaaggaaagagttttttatcctaaagccgaggaaaggagtttttatcatttagaaaaagtgatgccgaaaagtaaagctttaacttttttacgcatatgataaaaataaaaaagggaagggaagatagtggatgagtgaccaagaacgtcagattcaagcgctgcacggccaaattgaagatttaaaagaagaaatgtatcagatgaagcttgatattagcacattagagaaagaaaaaggaaagcctgttttgacaccggctctcgttggtcaaataggaggttttgttctaggtggattagctataatcggtattttctggatgtagaacttctcgttttgaaaacgaaaagttctcctgattttttaataagcaattccaacgcggcatttggggaatttttgagcccatatctcatggtaggtaaaatgagcggtatctcccgttgaaattttaacggcatcagctggtaaaatttctttttccattcgatacgtgcctgttatttcaccctcaggcaagtatgttgggcatataaccgtccagtttagatcactttccttcaagtgtaagtatccttttaaatgatcttctgctgctctggtcgttttacgctttgattcatttgattgaaaacgatacttttctggttctgttcgtgattgtaagatgcctgcagttccaatagtaagaatacgatgaacgccataatacttcatgctgtttataataagcggcatactttttgaaatcgtctctgcaccatctgtatttaacgcgctgactacgatatcttggtgcttgagggcaaagttgatattttcttgatgaagtacatcgccttgtaagatatgtaggtttggatgactaacctgtagcttattgcggtctctaacaagtacagtaacgtcgttttcatcttttagcatcatttttaataaagactgtccaactcgccctgtagagcctaatagtaaaattttcattggctacacccctctataaaagatagtatctattctttaggatatacaatctgtatacttattcataataaaaagcatgcgtagcataaagtaatacaaagttgatgaatgaaatattcaacaacaaaaaaatttgatatgataaaaagacagaaaaatcaaaaaaataggagagtgaatgtcttttgggagacttgcctctgaatcaaatgatgatactagtcgttttgcttatgttatcagctttcttttcatctgctgagacagccttttcaagcgtaaataaaattcgtttaaaacattacgctgagaaaaaatatcggggaagtaaaaaagcgctgcatattgctgaacactttgagcagacgctatcgacaattttagtaggaaatgttgtcgtaaacattgctgcgtcctctttggcagctaaaattgccctcgatatgtttaaaggaaacctagcacttgtgattagtatcattgttatgaccatcatcattttgatttttggtgaagtcttgccaaaatcgttagctaaagagcatgccgaatcttttgcgctgatgatttcttccttgttatttattattattaaattgttaaccccgatttccttcttatttttacaggtaaaaaaaggaacttatcacttgttaacgtctgctcctacaccaacgattacagaagatgaaattaaagtgatggtagatttaagcgaagaagaaggaacgattaataatattgaaaaagagctagttcatcgttcactcaattttaatgacattgtggtggggcaaattttaaaacctagaatagatgtcacagcagttgacgtaaatgccgatattgattcggtttgtcaaatgtttcttgaagagagatattcaagagtccctgtatatgaagatcatattgataatattattggcattttatcagaaagagaatttttaacctgtttaatccaaagaaaaaagatttctattcgtgatttgttgagacaacctatttttgtagtagaatccatgaaaatatctgttctattgccagagctccaaaaaagtaaggtgcacatggcaattgtagttgatgagtttggtggaacggccggtcttgtgaccttagaggatatattagaagaaattgtaggagagatttgggatgaacatgatgaagctgttaagtatgtacaccagataggggaaaaggagtacgaatttaacgccgacatccctattgatgaatttttaacctatatagcggttagttctcctgacagtacgtgccataccttagggggatggatatatgagcagtttgatcatatccctgctaaaggagactttttctcatatgaagagatattgtttaccattaaggaagtagaaaatcgacgtattcgcaaagtttccgtaaaatcatttgggaataagaatgaggaagctgattaaaagaaactagaaagcgctccaagagatcttggagcgctaaagccataatatgaaattagttaatattagtacttgccgcctaggttttgctcagctaattgtactaaacgttttgtgatttcgccaccaacagatccgttcgcacgagctgttgcatctggtcctaagtttacaccaaactcactagcgatttcgaacttcatttgatcgatagcagcttgagcaccaggcgctactaacttgtttgatgaatttctgtttgatgcgttttgataatttgccatgtgtattcatctcctcgttagataaaatagattgtaatggttgagttagctggagttgaaccagccgagcagatgcatcgattagatccgcttgcctaccgcggcgtaactcaatgcttgcgagctgttgtactcggttgttactagtattatggcgaaagggaaaaaacatatacatagaaaactattggtaatttatagaaatttttgtgtagagtttgataaagagtaagagagttttattccgtgcatattataggtacatattgatcaggtaaagcgaggtgtgcggatgtcgatttgttccttatgtaatgggtttagtgatgtacaaatgacgtgcaaaacatgtggaggagtgctgggggatatgggaaaagtcagcgattattttgatgattacagtgcttacatggaaatcgatcagttaaaagtagaaaatgggtatcctagtgatttagcaaatcaccaatgtattcatctcttttactgctctacttgtcacagtgaagaattgaagcaaatacaggaataaaaaaagacccctgggggtcttttttattcgtgttcagcacggatgcgctgttcagattctgcatcaaagaaatgcgctttgttcatatctaatgctaagtctagagactgaagcggtttaatatctgttcttgaatctacgcgtgctacaaaatcttgtccgccaagtttagaataaagcatggtttcagctcccattaactcggatacatcgactttgattgtaacttttgtgccaggtgaagattcaataaatacaggctcatcatggaaatcttcaggacggatgcctaaaataatttgtttgtttaaatatccttgctcgcgaagtattttcattttaccttccggaactgcaagaagagaatcgcctacttgaacctttccgtcttttaacgttccggttaagaagttcatagcaggagaaccaataaacccgcctacaaatacattttcaggtttttcatatacttcttttggtgtaccaacctgctggataatcccatctttcataacaaccagacgagaagccattgtcattgcttcggtttggtcatgtgttacgtaaattgtcgttgtacccaaacgctggtgaagcttcgcaatttcagaacgcatttgcacacgtaatttcgcgtctaagtttgataaaggttcgtccatcaagaagaccttagcatcacgaacgattgcacgacctagagctacacgctgacgctgtccgccggataatgcttttggcttacgctctaagtattgctcaagtcctaaaatacgagcggcatcttttacgcggcgttcgatttcatcttttggtaatttacgaagttttaagccgaaagccatgttgtcatatacgctcatatgcggatacaatgcgtagttttggaataccattgcaatgtcgcgatcttttggagcaacgtcatttacacgcttgctgtcaatataaaaatcacctttggaaatttcctctagccctgcaaccatacgaagcgttgtcgatttcccgcagcctgaaggcccaacaaatacaataaattctttatcttggatgtgaaggttaaaatcttttaccgccgtcacatctttatcatacattttataaatatgttctaaacgtaattcagccatttccatttcccccttgtatgtactctgtgaaaccgttttcttaaatctagtgtaatttttttaaatgaaacggtaaatgggaaacatgcacaaaaaaaagaaagggttttcgtgcactatttacgaaaaccctttcattttattttccatcttgcgaattttttaaagcaagaatggctaagtaagcagacacagctcctgtaaagtgtttgatatcaaggtgtgtgcgatcaataaatttctcaattctatactgcaagctgttgcgatgcatgtacaatttcttagcagcaagagatacgtttaaattacattctaaataaactttaatcgtttctaaaagatctccatcatcttttactaagtcaagtaaatgtatcatatgattttggattgcctctgaagactcttgcagaaccaaatggggtaaaacgtcggtaaaatggataacatggttttgttcgactgtatgcttaatttgataaaaccatttcttttcacgctcaaaaattaatcgcggtgaagacggaaaaaagtgaatttgtccttcaaagaactgaattgaagtttcaaaatcatgacatagcacctcgatagaatctgataaattttcagttaagtcattaggatcattaaaggtttcgatgacgatacctgattgtttatcaatccacaacacagtaatcgaggtagaatacaaggcgtgaagcgcattttcaaactctattttttgttcaaacaaacgtttaattaaaaactgggtgaagcgaaaagaatggtgcttatgatgagaatgaatgactttttcaggtgcttcaaataacaggtctgaccaatacaattgctctggcgtcagtaaagaaattttctcatcataaggggttaaaaaagcagaaagtaatgcctgctctttttgagataaagcggtgtgttcaattccaatgaagccttcatcacatgaaaaccatttgtaacgttcaaattgagaagggattttagccttaatcattttatccccaaatagtgtgtgcaactgtttcatctgtgctcgttcccttcggtgaaagcttactattcataaacgtgaaaaagcataagctcatgaatataatcaattaattgtgtttcatctatttgattagaaggcgcagttttccatacaatttgtccatcttttaaataatcagcctcataataaacccgattcatataaaacgagatatgccagcccggcattcgattattttgatacagcggtttaacctgaaagtgtgaaaccataaagaaaatctcctttctcaattagttattataagcttaccatgagaaaaggagatgaaaaatcatttaatctaaaaattttgttaatttgtaaaatatgttgcatatgtgtttagcaccttgcgtttgaatatctgtttcatcaaaaatcatcggttttgcattcacttcaaacaaataatactgcccttgggctgactttgccatatcaagagaaaattcttcaactagagggaaggatttttgaaggacttgcccgcacgtatttacaaaggacgaaagaaaggaagtatctacttcattttctaaatcttgaaaaggtgaaatgctgccgccgtttaacgtatgtgttgtaatggattgatagggactatgtcgaatgccgacgccgctaataacatatccgctatctttgtgatgcgctaaaatacgtaagtcatagcgcctgtctttgaatggttgcgtctcaatcgcttcttgaatgagataagcagacctgggaaggtcaattgcttgtaaagaagaaaattcttctttgcgtttatgatcttggtaaataatcgtatgcttatgggaagataatcgaaaaattccagcacctttactgctgttaataggcttaaagtaaagggaagagtgcttttgcagaagcttagcaatatcaatttctggtgttaaacgataggttttaggaaggtgagaagatagtagtggctcctttgaaaataattgatatactttccattttgaaaaaaaagcggaattaaaaagtgggatgtgcttgcctttaattttttgatgtaaagatgtcagcttcttagtttctgattttcttcctggataacgattatatataacgtttggcagcggcaaagttgttttgatccactgcttttttgcaccgtcaaagcaatacccttcaaagaagtgatgagacattgtttcttcagcgaataaagcaagaagcccgcctttttcttgcagggtatgatgtaagagttccaataaagggcgctgttttacattcagtttttccaaaaccgctttgttcgttaaaactcccacaataggaccgactttttctccttttaaacgaagaaaagcttgagtagaagaaatgttttgagtaaagggaagttcaattttttgaactccccatgtgtaagatgctgaagggttatgatgaaaccactgctgcttttctttgtgatagtaaattgtaatcatatgctgatgccttcaggtgtatttagatagtatccagataagtaaatcgcatattctagagaaagttttctagtttgttgatccgcttttcgtaaggcagggtgtgaaaaaatagagcgaccgggcttggagttagcttcaaacagccatacgtttccttgataatccactccaaaatcgaatccaagctctccaattaatccgttcaactcctgttcaagcacatgactaattgagatagcggcatcttttagcttattttcaatttcttttttgtaagaagggttggtgaatattttagctgtagcttcaatttctccgccgtaatcaagatgcgtagtgatgctgttgggaccggctactttagcagccagagcagtaagcacccattggttattcccgtctttattcgtatgcacgcgaaagtctacacagcgcttttcttttttgattaatgaaataccttgctgagcaatgtaggaaggattagtaagtaaatattcaaattctgataatagatcctctaaggtttctttttcttgaacatgaagacctttttctcctttgtaagtcagcgtgtacatggaactcttaaaagatagggtataaatgccccggcctaagcttccgtttttcggttttaaataaacggtttgatgaagaagcagaagtttttttatttgctcacacgaaggactttcaaccgtgtaaggtaacaaataggctgtctgctcgttcagttttaaaagctcatgaatttcccacttgttgaaaaaatcaggattaaaaaatggaatgccgtaatcagtcatcatcttttctttaatgaacttaaaaggagctaacccttctgtttttcgatttggcaaacgattatatacaacgttaggaagcgggatttcatgttgtgtccagccgctttcttcataaaaatagccgtttatggtcccggtttcccagttgatatgatgagttccaaaaataaaaggcaggccccctgttatacttgcagtagaaagaagtttagctaagtgaagggaacgctttccaattggccgcagcagagaaccagtaaaaccagcggataacacaccgattaaaggtcctaagtgaatggtctcattcacaataataggatgcatcatatgggcgaaaggaatttgaagttttgtcattagctcagctgaaatctgaatttcttcacgttctgaagattgtataaggcatggagctgtcatggttccaaaagctgcttgtttcaaggagtctttgtaaagagatgcaggaacagaaagatcacagcctagctgctctactacaacaaggcgagtaagagtttttttcatagcattactccttacgatacgatagtgtgttagctaaatagacgcagtaagacaggacatttttatacatgacttctttttgttcaggtgctgtttccattactatttttcttcccggtttcgaatttaaatctagaatccagatgctgaagtctctcgagatacataaatcaatacctaattcaaaaagagaaggaaagtgattttcgagcacggacggaatcgttttacaaatggtgttgatttcatcccttacatattgacgatgaacgcgaggaatgcgaggcagcaagttctcaaaaggtacaatagatgctcctgaacttacatttgttacgatagagtcccgttcaccttgtctaatgcctcttccaatttctttccaagcaccatcgtttcctttttgtaatagcagtcttatatcaaaaggagtgcgttcataagggaaaaatgaaatatggggttgagcaatatacagtacatcacgggtggttttcgtaaaccagttcttaaactcttgaaaagaggaaaatagaatggtgtttacaatgtcattttgttgataagaagcttcaatttcacgtccacgctgtcttaatttcacaatccctttaccttgtgagccgttggcaggtttaatcattaggctatcgtttgttcgaagcagctgaacaagttgctctacactttcgattggagtggtaggaggaatatatgaagataaatagctatcttttttaattacttcatagacatctagcttattgggtaatccatggcctaaaaatgtaacatcttcccgctgtttaagccagtttacaatagggcgagcctttttagacagagagtcttttcgataaaagcagcgatcgtaaataaacgaaggaagtaagaaggaatcttctatccatttcttttgttgtaaatcgtagcggaagccttcaatattttcggtgttaggatgaatgttaaaaggagtaaaacggtatatttcaatcgaaaactcagaagcatgtttagcaatttcggtcacgtactccacttcttgctgcgggtgaatcgttaaaaagcctaatgaaatcatcataaatcctccttgggaaattgaaaattcgttgcatgcagacaataatcaagcagtgcttttgttgatggacggacagagaaagcgcttgaatcagattgtttggaaggcttgacatttacttcaataatccaaggctttccttcttgatcaatcgctaaatcaataccgaattcggcataaagttcagacggatgagaaagctgcgtgcaaatttcaatcgcaatctcttttaaaagtgaaaggatatggcgggtagtttttgaatcatagagctgagttaacacttgctgaggaggatgaatatctcctccacgggcaagatttgagacgaaattgccgggttttgatacacgtgtgacaatggacgtgattttccacgtcaagtcgtcttttttatgacagagaatgcggaaatcaaaagggcactgtttgtatgtctgcagtgaaattccttcttggatgaggaatccttgcctttttaattgactataaagcgtttcaaataagtcataaagagattcatattctttttcatatgtctgcgtaaacgttgtatagtctaaaatatacttctctttttttgaaattttaaaaatattttttccttggctaccatgaacaggcttcaaaaaaacatcgtcatgaagttccaaagcgtcaagaagatcttgacgtgaacgaagctgatacgtttttggcaaatatggaagcaagtgtacgacatctttaagctgttgaaaaaccgtccatttatttaagtagcgtgcgttaaagaaaggaacgtcatgttcttttaaaaatgttttaaaggtttgaaaatcagcggtttgctccgttttcctggcatgaatccgattgtgtacgattccaggaaagggaacgtctgaataaacccatcgatcagcgcgataaacatatcctttaggggataatgacttcacgtcgcttaatttactcacatagcaaaaacaccctaactccttgcaagcttgaacaaattccttacaaaatacagaaatggagccaaagagttcttcatcttctcgaacttctgttacgatgctaatgacgggtcccaacctaaacgtgttctcttcataaatgcctctcagctgatgtgcttcatacggaaagcgaaagtctgtaaatagagcttctgacatcatgaaacagcattctcgatgctgaaaaacggtggcttcgacttctttcgtaatggagcctactgttaacgtaaactcgtgcttgcacttcacatgggagaacagagcagaactaatgtaaatgtcgctgctcatatggttctctagtggttttagagaaatggtaaaagtattcataaacgaatcctctttttctttcctttagtaggcgaatgctgatatatactatgaggaattagcccaatctgtgaagagaatttatcgttttctaagaaaataaaggtcttaagctgaattttatataataatttgttatagttagggaagtcaagaaattatagaacttaattaggaggaacttaacgtgtctgtaaacttacatgatgtagcaaatgatttagaaaaagcaattcgtcaaagcgaagattacacaaacttaaaaaacttatatgcagcagtaaacgctgatcaaggttcaaaacaattatttgagcgtttccgtacaatgcaaatagagttgcaacaaaagcaaatgatgggccaagaaatcactgaagaagaagttcagcaagctcaacaaacagttgcaatcgttcaacaagatcaaaatattgcgaagctaatggaagctgagcaacgtatgagcatggtaattggtgaattaaacaaaattatcatgaagccacttgaagaactttacggtgcggctgaataagagatagagaaaagaggaaaagagaaatcttttcctcttttttttatgcggaaattccttctaattgtgcagttctgctcataagcttagtaacaaggctacacatgccgactatcatgaaaaggtcatttataaccgtatcctaacggattagacatctatgaaagaaggggttctcatatggcttatcgattgctagcgttgaatattgatggaaccattttaaatagccaagggcgcgttacaaaagaaaccaaagacgcaattcaattcgttaaaaataaaggggtttacgttacgttagtaacaaacaggcattttccgtctgctaaaaaaattgctcggtcacttaaagttcatccagcaatgctcattactcatagcggtgcctttatcggaacatcgatagacaaaccgatactagataagagaattagcgaggaaaaaacatttaatctcattcagctttttgaaaattttaattgtcatgtccgcattttacatgaaaggttttcaattggaaatcgtgtaaagcttcctaataatatcgtagctaaaagcgtgttgaaaacgggagaaccgctcttttatcccgtgcagttcgtagattcattaggagatacacttcgtgatgaacctgtttctacgccaaaaatagaagtttattttgcagatcgtagagaaaaagaatatgccgagcaaacaattgctagtgcagttccggatattgaatggttttcgtatccaaatgaaaatagatgttatattacgccaaaaggagccacaaaagctgccggcgttcgttatgtagcaaatcgtctagggataccaatggaagacgtggtagcaattggaaattgctatgatgatttagaaacgattgaacatgcaggaatgggtgtggccatgggcaattcaccaacagaattaaaaatgcttgcggattgggttactcgttctaataatgaaaatggtgtagcctatatggtaaaagaattatttagaaagcagcagcgccttggttatcttcatcaaattgacagctttcgtttaaaataaataaaggaaaaaagaggctagtacaaaagcagtttagccgaaggaagatccgaacgatgaatcgagattcttgatagagaatccaattcgttcggatttttttattggaagagtgaacgtagatttcatatatgtacgtgcttctagcagttgattggagggcaaggcgaagacttccgtgcgaaaagcgcaagcgacgagaaggctcatcgcccgcccgcggaaagcaaagccttgcatggaaatcaacaaagtgtaacaagcggttcagctcatgtatctcatttgttcgtctttagattgaattaatgtttatggctcaatctcttttccgtttgtttcctgtccgcgcattcccttgaactgagcaccttgaccggacatacataggttttgtaaactgattacttagatagaattgatttgaaaggtgattatattgaacatttatataaaaggtatagaagatgaacgttttttacgtccgcttcaccgaatttcagatttgttttttgaagaaagcaacgtctcctttgaggatgataacgaagctcagctgaaagtcgaagtagagctaaaagttcatgaagaaatttatgcgaaagcagtactccatgacgctgaaacggacaaagtgtttacagaagagcttgctaaatcgtttacgccatatgaaacagaaaaagaaaaatttaagcaaataaaaaatgtggtgcttcgcgtctacttatctgtactacaggagtatacaagcattgttcaaaaatggggtattttaactggtatacgtccaacgaagctgcttcatatgaaactgcagtcaggtaaaagtaaagaacaagcgcatcgtgagctaaaggaagaatatttaatcaccgatgacaaaattaatttaatgcagcatattgtggatcgtcaactagcagctattcccgatttacatgagttaaagaacgaggtaagcatttatataggcattccgttttgtccgacgaagtgtgcatattgtacattcccagcatatgcaattaacggacgtcaaggatccgttacgtcatttttaggcggcttgcattatgagatgcgtgaagtaggaaaatggctaaaagacaataacgtcaagattacaaccgtctattatggtggaggtacaccaacgagcattaccgctgaagaaatggacatgctgtatgaagagatgtatgaatcgttcccggatgtacaaaatatccgtgaaattacggtagaagcaggaagacccgatacgattacggaagaaaagctagctgttttgaacaaatggaatattgaccggattagtgtaaatccgcagtcttatattcaagaaaccttaaaagctattggacgtcatcatacagttgaagaaactattgataaatttcatctttctcgaaaaatggggatgaataacattaacatggacttaattattggacttccaaatgaaggtgtagaagaatttcagcatacgctagacgaatctaaaaaattgcttcctgaatctttaactgttcataccctatcgtttaaacgcgcgtctgaaatgactcaaaataaacggaaatacaaagtggcagatcgctatgaaattggtaaaatgatggatttagcgactgagtggactcaagaacaagggtatgaaccttattatttatatcgccaaaaaaatattttaggtaatttagagaacgttggatattcattccctggtcaagagagcctgtacaatattatgattatggaagaaaagcagacgattattggtcttggatgcggggcctctagtaagttcgtgcatccagaaacaggcattatcacaaggtttgcgaatccaaaagacccaaaatcgtacaacgatggattcgagcactacacgcaagagaaactcaagattttagatgaattgtttaggaaataaaaaggtcactttttagtgatcttttttattttcggcagggaaatgtcggaatctgttgaatatataaaaaagttgtaagcgttttcttattatggcgatgcgaggtgccgcttaatgatgaatgtacagttaaccgtaccatctatgatggaaagagctgaaaagctgtttagtaaaaaagaagtggtttctaaatcttcaaaaggaattcagcgtttaacttataatcagttaataaaacggactcggcagctctctagtatgctagaacgaattggagtgaatcgaggagaaagagtcgggacgtttgcatggaatcatcatagacatctagaagcttattttgccgtgcctggaataggtgctgttcttcacaccatcaatatccggttagatcctgagcaaattgtatacatcattaaccatgcacgcgataaagtcattttatttgatgaatgttttttacctttatttgaaagcattcatcacaagcttccacatgttgaagcctatatcattatgtcagatgaaaataagctgccaaaaacagacttgccagtttatcattacgaaaattggattaagcaaggggatgcatcgcattcttttgttcaagatttaaacgaagaagaaccagcaggtctttgttatacctctgctactacaggcgagccaaagggcgttgtatattctcatcgcgctatttatctgcactgtatggcgctagggcttgctgatagtgctggattatcagaagctgataccgctatgcctatcgttccaatgtttcacgtgaacgcatggggaattccttttgctgccgtttggtttggaacaaagctcgtgctgccgggtgctttttgtacttcagagacgattgcttttttgattgaagaagagaaagtaactctggctgcagcagtacctaccgtttggttaaactttttacaagagatagaaaccaggccttacgcagtcgatagtttgcgagctattttatgtggcggatcagcggccccaaaaagcgtcattcgagaatttcaggaaaaatatcaaattgaatttatgcatgcatacggaatgacggaaacaagccctgtggtgaccgtctcccgcttaaaaagctatcagtacagcgaagactttgagtatcagctcaacgtaaaagcgaagcaaggtttcttagttcctggcgttgaaatgaaagtaataggtcaaaatggagaaattgcttgggatggagtcgaaatgggtgagctattactaaagggcccatgggtagcttctgaatattacaaggataaaagaacagaagatacgtttaaagacggctggctgtacaccggagatattgtgacggttgacgaagagggaacgatcaaaatcgtagaccgaacaaaagatttaattaaaagcggaggagaatggatttcatcggttgatctagaaaacgcgcttattgcccatgaagctgttttcgaagcctgtgtaatagcagtccctcataaggtgtggcaagagcgtccggtggcttgtgtcatgttaaaagatgcatacaaaggcatcgtttcgtcagaagagctgctcgaatttttagcgccgcagttcgcaaaatggtggcttccagatgacattttatttatggatgagatcccgaagacaacggtaggaaagttcttaaaacgtacgcttcgtgaacaagtcctcaatcattatcagaaagggtgagtaagatgaccgtcgaattaaaagtagtagaactagttttgcaagagcgtatcgccacaatttcgtttaacaggccggatgcgttaaatgcattaaacgaagaagtgctagagcagtttattcaatgtttaaaagttgtcgaagaaagtgaagcggactttttaatagtaaaaggaaacggaaaagtattttcagcaggcggagatattaatatgatgatgtcaccttcacaatcagaacgttttgagcaggtaatggatttgattaatgaagccgtgctgactttatatagcctccctcaaatgacaataagtgtactgcacggtgcggcagcagggctaggactgagcatcgcacttgcttctgattatattattgcagaaagacacacaaaaattgcgatgaactttatcggtattgctctaattccagacggaggcggtcactttttactagaaaagcgcatcggtgctcatcgtgcaaaacagctaatttgggaaggaaagacattaaaagcagaggaagctcatcaatttggcataattgatgaaataaaagaaggagatttggcgaagcatgtagaagattatctctcatattggctaaaaaaaccttcacgtgctttgaaggaaacaaagcgaatttatgtggagacatctgtttcacaattaaagcaagtgcttgcgcttgagaaaagaagtcagtttgctatgagccaaagtccggatcataaggaaggtgtacgtgcgtttctagaaaagcgagcgcctgtttttaatcaaagtgaaaaagatatttccgaaaattaagtgaactagtttaaaagccaatatttttgtctatcatattgatagagcatgtttaaaagttgcaaaacagtggtaacacaagataatgtagaaactaatgaggtgattggaaatgaacaaaacagatttagtaaacgcagtggcaacaaaatcagagttaacaaaagcagatgcatctaaagcagttgatgcattactagaaacaatttcatcgacgctaggtgaaggtgaaaaaattcagttaatcggcttcggtacatttgaagtacgcgagcgtgctgctcgtacaggccgtaaccctcaaacgggtgaagaaatgcaaattccagcatcaaaagtaccggcatttaaagctggtaaagaactaaaagaagctgtaaagtaatataaaacgccggaaagctaaaactttccggcgttttgtattaacgatgaaacaatacaagttttccgctagagctaacgcatcgatgcgttttttctaaataggaaagctcttctaacttcttggtgccgatagtctttgcttctgtctcagaagctgcttcaaaactttcatctattaatttttcccccgtcttttcaaaagcggttaatgtgtaagtactcataaaatctactctcctcttatagtataattgtaagcgtattcaacatatttctcgtcctattcccctaaatcctgctaaggtttacagatatcatttttttccatacaataaacataggtttatttacaaaggaggaattaaatgtctctttctatccgtgaagtttcaaaaaggtacggtgaatttacagctgtaaacgagctatccctgcaaattccaaaaggcgaagtgttcggttttttaggtgcaaacggtgctggcaaaacgacgacgtttcgaatgattttagggctcattgaaccaacctcaggtcatatccaatggaatgataaatctttaacttacagtagaagtcatctagttggctaccttccagaagaaaggggactgtatccgaaattaaaagtcaaagatcagcttgtatatcttagacggttgcgcggaatgaaaaaagcgaacgtgctgcaagaaatggagcattggttatctagattcaatattccccaatatgcttccaaaaaagtagaagagctatccaaaggaaatcagcaaaaaattcaatttattgcctctgttattcatcgacccgagctgcttattttagacgaaccttttagcggcttagatcctgtaaacgtagaggtattaaaagaagcggtgcttgatttgaaaaaacgcggaacgacgattgttttttcaagtcatcgaatggaacatgtggaagaactttgtgaatatttatgtattatgcatcatggcacgcctgtagtgtatggaaggctgcccgagatcaaacgttcatttggaaagaaaaacgtcattgtacatggaaaaggtccgtttgagagaattacagagcttgaaggcgttgtaaaggtaaaaaaaacggctgagggcatgattgttcaaattcaacatgaatccgtatcacaactcatttttcaagaacttaaatacttttcatttgtatctaaattcgcagtggaagagccttcattaaatgatattttcattgaaaaggtaggtgcttcctatgaataaattttgggtcattgtctttcatacatatcttaataaattaaaaacaaaatcttttattattacgacgattattactgctcttattctagttgctcttacaaatatggagaaaattatcgacgtttttaattcagacgataatggaacaaatgtgggtgtcatctatgaagttgaaagcgtatatacgttgttcaaacaaaatgtaaatgccatggataaagacattcatttaaaagaatttacgtctgagtctaaggcaaaacaagcggtaaaaaacggggagctcgatagctatttacttttatctttaaacgataagcagctgcctcaagctgtgtacaaagctaactctttggccgaatcaaacctttcttctaccttagaacaggcggtacagcaaacaaaagtggctatggctacagtgaaaatcgggttagaagaaaagcaaattgatcagctttacagccctgtttcatttaaaaagaaagcgttagttgaaaatgccaaaacagaacaagagctaaatcaagcaagaggtcttgtgtatgtactgctgtttgttatttattttgctgttatcatgtatgggagcatgatcgcaatggaagtagctactgaaaaatcatcccgcgttatggagatccttgtatcgagcgtatcacctattacacaaatgtttgctaaaatcattggaattgcactgctcagcttaacacagcttgcagtgatactgagcgtgggttacacatcgttaaaagccagtgtggaaacaaatcatagcggtatcttttcttatctcggatttaatgatgttccgctgactacattcgtgtatgcatttgtcttcttcatattggggtacttcctttttgctacgctcgcggcttttttaggttctcttgtgagccgtattgaagatgtacagcaaatgattacgcctatgactcttgtgattgtggctgcttttttaattgctatgtttggacttggtgatcctgaaaccacaatcattacggtcacatcttttatcccattttttgctccgatgattatgtttttgcgtgtaggtatgttaaatgttcctgtgtgggaagtgagtgtatcgatagggattttagttgtgacgattactgctttagctatatttggtgcccgtgtgtataaaggaggagtccttatgtatgggcaatctacctcttttaaagatattaaaaaggcgctgcagctaacgaaaaaagaaacataaagaagtgagaggctgagataaaagtagtttagttgaaggaagttccgaacgaacaacctagattcttgagggagaatccaactcgttcggatttttttattgctatagtgaccatagttttcatatatatgtggctgcttctagctgtgtattggagagcaagacgaagactcctgcgggaaaagcggaataggtgagaccccgcaggagcggaagggacgatgaggctcagcgcccgctcgcggaaagcgaagtcttgcacggaaatcaacagcggtgtctcaagcagttcagcgcctttatccaatttgttcgtctttagattgcattgattttgttatgtcgcaatctcatcttttatgaaaaagcgtctacccgtgcattcagtggcaagcgatggtaaaatgaaatgtaaagagctgtaaataagcggaagaagcgataagagcttcgttatcaaatacatagaatgaagtggtaaggaggaaaagatcatgacaaaaggaattgctcaatacgaagtaggagagcaagttgatctttattttttaattaaatcctcaacgagaggaattgcaagcaatggaaagccatttttaacggtaatcctgcaagataaaacaggtgatattgaagccaagctgtgggatgcttccccagatgacgaggaaaattatgctgctcaaaagattgtgcgagctgctggagaagtaatgaattaccggggacgcaaccagctgaaaatacgcaacattcgtcctgcacagccccaagacggagtgcgcacatctgactttttagaagtggcgcctttatctcaagaagaaatggtcgaacatattacaaagagtatatttgaaatgaaaaattcgaatgtccagcgcattactcgccatttgtttaaaaaatatcaaacggaatttctagaatatccggcagcaactaaaaatcaccatgagtttgtatcgggacttgcttaccatgtggtgtctatgttaaagctggctgagtcattttcaaccctttatccaagcttaaaccgcgatttgctttatgctggagttattcttcatgaccttggcaaagtatttgaactttcaggtcctgtttcgacgatatacacagtcgaagggaacctgcttggccatatttcaattatggtgaatgaaattggaaaagcggcagaagaattagcgattgaaggagaagaggttatgcttcttcagcatcttgtattatcgcaccacggtaaggaagagtggggaagtccgaaaaagccgttaattaaagaggctgagatgcttcatttgattgacaatgtagacgctaaaatgaatatgctggaccgagcattaacaaaagtgaagcccggtgagtttacagagcgtatttttgcacttgataatcgctcattttataaaccaacgattgattaaaaaggtataagtctttcttccttcgcatatagtggttgtaaataactgtgatgggggatcaatatatggtgacactaccaatttggatttatttagttgtagcaggcattttctttagtggatttatggcgattcgtgctgcacaacatgataagcaagtggatgattcgtttattgaaaaagagggacaagtcttcatcgaaagaatgcaagtggaaaaagaaagacgcaacagcgattccatctgattatataaaagagcctgtcacatgagtgacaggctcttagcattactgctgaggagtttctacgccagattgactatctgtcgcaccttcttcgaaaattggttttacatccttatcttttggtttcacttttgctttatcaagctctttttgaatcttcttgttcgcttctgcttgatctacttttgaacgtttgatttgctgctcaagttcgggtttctttttctcaaacgattctactttctttttatccactagtttgatgatatggtagccgtactctgttttgattggtttacttacttcaccttttttcagcttgtaagccgcttcttcaaattctttaaccatttggccttcaccgaagtagcctaaatcgccgccgttagctgcagactgctgatccgttgaatattcttttgctagactagcaaagtcctcgccttttttgattttcgcttctacttcgtttgctgttttttcgtcttttactaaaatatgacttgcgcgaatttgaggtttttgagctttatattcatcataagcttttttcagctctttgtccgataccttaatgcctgccgtagcagctttttcacggagaatatcaacttttagcatatctttgacttctttttcgcctttttgcttaataactgaatccacctgatcaccgtattgttctcttagaatgttcagctgctgatcaagctctttatccgttactttatattttttactcaatactttttcttcggtaacgcttcgtacgagtgtattaaattggtcttgtccgattgtatctttcatttgcttatacaaatcaccttgagtgatattgcctgcttttgtttctacaattacttttgaagaatcgtttgcatttgaagcatcatttcccccactgcatgctgataaagcaacgaggctggctgccgttgttagtgcaactaagctttttttcatacgtaaacactcctactcatcatttttacttatgtagcttgactcaagatttactatatcacatttcctgatgttagcaaatgaagttaaaaccacgtaaatttacatttattttccactaagcatggagtgattatacgcttatgatggcttttttataaagcgttttcaaaatgatggacaaactcacagagtaatctccaaacgagaagcaagagaaataaattatggagtttgggctaaaagcctagacgttttttgagctgatgcataagatgcagtattagtaaacaaagggggtgctcaaatgagcggaggcggatatggaggcggttttgcactattagttgtactgtttatcttattagtcattgttggttgtgcatgttaccactaggaaacagatgaatataaaaggaaaggggtgatagatatgggttcttacggatgcggatacggcagtggatttgcgctattagtcgtattattcatcttattagttatcatcggagctagctgtttttgctaagcctataaaaaagcggtgagacatctcaccgttttttatgtaaatgatacttcaatataagatgaaactaataaaatggtaattaatacattaatcgtacgaaaaactttaggctgtttttcagctggaacttctttttgaatacacaatgtatttgttagtgcattgatgtagaataaaatgaatagcgcaaatacaataaagaatatgtacataaaaatccccctaacaaaatcagtgtgacgaagacaaaaagtcttatagtcatttatatagtacagctttgtatgaatttacaaatatctatattaacattaccaaaaaagcggtaaaatagatagttatatatacagttgagcaaagaatttcaaaaggtatttacacagaaatgcggtttttattttataaagggtagttaagaagttgagaactaggttttaaacgaaatagcaaagtgaatggataagaaatgagtaacaattacccattgtgccaaaggaatgttaaaaaggacagagggatttatattaatatatgcagtgagcacataatcagtatatgaaaatctttatacggtgctacttaaacaggaaatgtgaatgacgcagaaagaattatttggaagaacatgaatgaatcatgtacaatatggagtagaggtatatgaacgttgaaggagtaggggaagcggatggaaactttagaatctcgagtatcacgtttagaatattacataaaactgttatctgggacatctgaacaagaagctaaaccatttattgatttagtggtaagaaatcagcttacaaagaaggaagtagaggaaattttaattctgtgtgaagatacaaaaaacgaatatattgagcaaaaagcggaaggtctaacagactttgttccgcttcttacacaatttgttggcatgctgaattataaattaactcccagagagacggtcgaatcgcttcgttatcaaccttcttatcaagatgtgatgaatgaattttttgaaattattcaatggataagggactaaccattaagagtttgaaatagtctcgtggtggttctctttatctttcttgacaagcttgccatcttcttcagtgaattcttcttcgatatgatggaaagatcgctcgaagatatccataaaatcttcaccgtaaattttgcggatgacggtcattagttccataaactcagggaatttgccgtataagtcgcgcaacggaagtgcgccgctgaacactgaattattagaaggttcgtaatgttccattaaatctaataaaatggcctcgcctttatctgtcagctgaatgtacgtatttcgcttgtcgctttcttttttagaaaactcaagcaaacctcgttcttctagttttttggagaagttaaatgcagtagaaacgtgcataactccaaatttggcaatttcggaaatggaagccccgtttaaatgatatgaaatccataaaatatgatgctcgttaatattaaggtcataaggcttaatccattgctgccaatccttctctacggttttccaaagggctttacttaattaggcaatgcgttggctaaatagaagtgcttctttcaaactgtaatcttgatcactagtctttttcatcttctcccacctacttagtctctttttttatttatcttctattatgccaataaaataaaaaattataaagatgtaaatttacaaaattttaaaaaattaaaaaagaaggcgttttaaccttcttttttgtcaattttttcattgggatttttagttgtctgtacatgttcctctaggtttgacaaagaattttggatttctttcaaatgatgctgaagggattccttatgagggacaatttcttctttaaactgaccaagggtagtagaaaggtcacttgcgatatttttcactatagtatttccttctctggcggtcatttgtacttgttgagaaacagcttttatttttgttgagagctcttgttgtgaagcgttaactcggtcttttcgagagctgacacgctgtttaagttctcgtcctgaatatggagtaacaagaagcgttgtaatagcggctacggtgcttccgattgctgctccagctgctagttttttcattctgctcattatttatttcctcctatgtagtaaagtaattgctaacacttccttctgacataatcataaaaaaatagcataaatttatacaaaagaaggaggttatcaacatggggtagctttattcattcttttgataattagcctgagtttttttctggctgcctttaaatggtttagccttacgactagaacggcatcatatccacctaaacatgtgctgaaacaaaagtctcttacatgtgcgacagtggcttttgcgagttttttattggtgcttatactttattatgtaacctaggatggagaacttaaacctttattacatagtaagtcttcatacctattgtatgagctgcaaatgaaatttaagtgaaaagcattctgtaccatttctttttaaacaaaaagttaagagtcgaactgtagattgtctctaaaagatcagcaacatactatgaatgaaccgttttatctaaaggtccgccacgctttggcgggcctgagcttttggtgtaaaaaaagagcctgattcttaattaaatcaggctcttgacgttacgataattttgctttgatgcttgtgcgttttagaacggattgaacaattggataaataacgaccataacgattgtgttcactactgttgcaggtaatacaaccgcagtaacaagcgccatgacgctgtttccgcccggtaagccgacgattagcgcggcagcagacaagaatacggttcctgatacgagtgtgccaacagctgttaaagcagcggcaactggtgttttaatgcctgttgcttttttcacaagcataaataatgcaaagaaaacaaatgctgtaattggtttatcaatcaagtttgcaatttgtccgccaggaaagcttgttgttaaagcagaaataaccgctgtggttaagctaaccaatgcaacattttttatgctaggaaacaacaggattgctaaaaacatcattgttaacatcatatctggcttcattccaaataaaataggaggtaccaccgtgtggagaaccgctccaattccgactaataacgctaaagaaactaaaacctttgtattcatttctcatctctcctcttctaagctaagctcgaaatataccaatagtgcgtctatgcccattgcatatatttacatactgattataacatatttatgtgaaaaaaggatcagttaattctgccaattatgcgtttgcttgtgcaaattcatccataaaggcggcaagagcttcacacgcttcaagcggtacagcattgtaaatagaagcgcggcatccgccgattgaacggtgtccagctaatcctacgaagcctttttcttttgcttgctgtaaaaacacagccgttaactcatcggtcggtaaagtaaacgttacgttcataattgatcggctttcctctgtagcgtgaggggtatagaaaccatttgaacgttccatgcttgtgtagagtaacttagcttttttatgattttgggcttcaattgctttaacgccaccttgttctttaatccaatctaaaacaagtgaaagcatgtaaatgccaaacgttggaggagtgttgtaaagagagttgctctttacatgtgtctcataattcagcattgttggtaaaccttcaggaatacgtttaagtaattctttcttcaaaatgacaaccgtgacaccagatggtccgaggtttttctgagcaccagcataaatgagagagaacttagatacatcaatttgacggcaaagaatgtcgcttgacatgtcggcaattaagtctactccttcgatagacggatagtcagcccattgtgtaccaaagatggtattgttggacgtgatatgcaagtacccaatctcttcttttggaagctttatatcatctagagatggaatagagcggtaattttcttctttagtagaagcaacaactgctgtttttccaagtttctttgcttcttttaatgctttttccgaccatgctccggttaggacatatgcaccgacttgatcgggagctaaaaagttcattggaatcatagagaattgcaggcttgctccgccctgcaggaataaaatttcatgtgtatctggaatgttaagcaattccgtgagtgtttctttagcatgtgttaatacatcttcaaactctttgctgcgatgtgataattccatcacagacatacccgtatttttaaaattaactagctcctcttgagcaagttgtaagacaggtaggggaagcgcagacggacctgcattaaaattataagctctgtttaacgtaatcacattaattcctcctcaaattagttcgaacactcatcatacaaaatggctaatgactgatgtcagaaagaatatcattatactatcatgaaaaccattgattgtggaggtaacttttcaaaaatttaaattaatctgtaaagagaaaataatagaaaaaagataaataaaagtatacgcaaacatgttttggcaaacatgtaaatgaaatgtttatatgctatactgatggaagaaataatgtggaggaacagaatgagagtattaaaatatgccatattagggctcttagatcagaaggagctcagcgggtatgacattaccagactttttaaagaagaggtcggtaatttttggagtgctaagcacagccagatttatcccgagttaaagcgattaacagaagagggttttattcgctatgaaaccgtgattcaaggcaagaaattagaaaaaaagatgtattcgataacggaagaaggaagagccgagttaagcaagtggctcactacaattgatcctattcctgaaacaactaaagatgaatttatgttaaaagcttattttgcttcatccatgtcaatagaagagttaaagcaacaaatagataatcagctatcaagcaggaaagtgaagctaacttttttaaagaaacgaatggatgaccttttggaacaagttaatcatcacattaccgtttcgtctcctcaatttggtcattatttggtgctatctcgcgctcaagaccgggagacaagctatatcaattggcttgaacgcacgctgaatttaattgaaaaagaacaataagaaaaggtgagcggatcatgacttggtgcataaaatcatttcaagagctgacaaacgatgagctttatgaaattctacaggttcgcaccgctatttttgttgttgaacagaagtgtgcttacttagaagtagatggaaaagacaaacttgcttatcacttgttcaaaaaagagaatgagaaaattatcgcataccttagagttttaccaaaaggaattagctaccaggaagcttctcttgggcgcattattgtaaaacaagcacagcgcggtacgggtctcggaagagaactagtagcaagaggaattgattttttagagaatgagttgcacgagaagacaattaaaattcaagctcaaagcagacttcaaacattttatgaatcgtttggttttagacctgtttccgatatttattcagatgaagggcttccccacgtagatatgctaaagacaccttagaaacttcaccaattgtgtgaagtttttctatttctgaaacgggtaaggtgaaagaaagatgttaggctttagtactgcgcagatagaatcgatatgactactactaaattagtaatttatgaataagatagataatgaatttgtttctttttgcttattctttgattttaagtaagtgatatattgaagaaagtaataatattgtatataatgatttttgtaacaaaaatgtaacaattacgtaatattcttaatattggttcagaaagaaatttgttgtacatattgcttggaggcatttttatgagtgcaaaggaaaagaaaaataggtatatatatagtttggatggacttcgagctttcgctgttatgtctgtcattgcatatcacttaggatttggatgggcatctggagggtttttaggagttgatgttttctttgtattatcagggtatttaattacctcgattttactggtgcaatcttgggaaaatcctttgaaaaatttgaagcatttttggattagccgaacgagaagacttcttccagctgtgtatgtgatggtagtattaactgcagcttgggttattttatttaaccggccgttgttaacaacgctacgaggcgatgcattatcgtctattttttatatgagtaactggtggtttatttttcataaagtttcatattttgatagttttgggtcaccgtcaccattaaagaacttatggtcactggctattgaagagcagttttatattgtgtggccacttgttttattattgggtttaaaatttatcaaaaagaaaggaattctttctctattcattttagctggagtaatggcctcagctattctaatgtcttttttatatgagccaggaggagatcctagccgcatttattatggaaccgacactcggctatttgcccttttaatcggctgtttacttgcatttgcctggccgatgtatcgtttatcatcgaaaaatcttccagccgtaggcaagcaagtattaaacgcggtaagtatggtgagtttctttgtatttattctctgcgtatggagcgttgatgagtatactcatgcatcttttctttatcaaggtggaatgctgctgatttgtttaaacgctgctgtactggttgcaacgattagtcatcctagtagttttttaggaaaagctctgtcgtttaaaccgcttcgctggcttggtactagatcatatggcatctatttgtggcattatccggttattgttcttacaacacctgtatccgagattggccgcccggtctattggcatgcgctgctacaagtaggccttacatttatcattgctgaactttcttaccgttacattgaagtgcctatccgcacacgcggctttcgctattatttcaggcactaccatccgagagagctttttaaatggcgtaatctctctcgttcgagacaagcggttttgggcagtctcattttctttttggcgctgtttacagcagatatgacaagctttgctattagtacgcagcaaaaggatgaaacgaaagcgaaagagacagaggttaaaattcaaacgaatcataaagaaaatgcttcaacttctgtcaaagacaagaacaaagcggctgataaaaaagcagagaacgcggaaaagagttccggggaagaaaaatctgatgccaaagaaaaacagcagccgaattcttacagagatgttcttgcgattggagactcggtcatgctggatattgctcctaatcttaaagagatgccgcttagtattacgattgacggaaaagtaggaaggcagctcaatgaagcactgcagctaactcctagctatcaagcatttaataatccgaacagcgcagtgattattgagttaggaacaaatggctattttacaaatgaagaactggaacaactgttaaaagctttttcacacgcggacgtttacttagtgaatacgcgcgttcctcgttcctgggaaagcaccgtgaacaagaatttgaaagctgcttctgaaaagtttgatcatgtcacgctcgtagattggcactcagaggcttctaagcaccctgaatactttacatcagatggtgtccacttggtacctgaaggatcaagagcattaacaaaattgattgaagaacgtatgaatttagaagttaaggcggaaagtcgttcataataagtgaaaagccgcacgatattttatatcacaaactgattaaacatgtgttaaatgaatagttaaaacaaaaaaagcttacatgtgtaagctttttttgttttaagaaaggtgagaagaaatattgccagcgatttcttgaagtttttcaggcgtgtattcgcttgtatgctctttccatacagcaccgaatccatcgccttccccatagcgaggaataatgtgcatatgataatgaaacacggattgaccagctttttcaccattattatttaagatgtttaagccgattgggctgtatgtttctttaattgcatttgcgatttgaggaactacttcaaacaaattgcgcgcaatttccggcgttagttcgtgaatgtcttttttatgtacttttggaatcaccagcgtatgcccttttgttacttgactaatgtctaaaaaagctaatacatgttcattttcaaatacttttgcacctgggatttcaccgcgagtaattttgcaaaaaatacagttttcatcatgtgtgctcattatattcaccttccgttaccaatataaatgtatgggtatacatgtatgtttattttaccacaaagtagaaatgcaatcagcaggcaagaaatagctgctggcattttatacacaaaaacgggatgcaaacgattatgcatcccgtcatgtgaagaaggaaaaaatagcttttaatgcagcatatgatctttaaggaacacctcatttacgtaattgcattgcctaatgaaacagtaacttgaaaaagtatattctctttaacaaacacctcatttaagcattgagctaaaaaatatacaatgtgaacgaaatcgttcttggtctttgacaaacacctcatctacacagtaataaatgaacattattgtctacccattatatatattcttactacgttcatgactaccatccccttatgaatcaaacatacatcgatttacaataaggttttctgaaatatgcctgctgtagacacctcatcccaaatgtaagaagctttgtaatgattagttgtaatcaataacttgttttccttcttccctatatagaatgtcccgatatttcgattatattctggaaaaattaaccgaaaaaaattgaaaacaatgtgaggaagaaaaagatttggtacaatagagcaaatagcgcttgcgcttggagacaaaaaagaacaaataaaaggagatcgtgatgggttctttattgcaaattaacaatattacagggggatatacaaaaactcccgtcttaaaagatgtatcgtttgatgtaaatgcaggtgaattagtcgggttaatcgggttaaacggagccggcaaaagtacaacgattaaacatatcattggattaatggaagcaaaaaaaggaagtgtatccattaataataaaacctttcaacaagatccgacaggttatcgaagtcagtttacgtttattccagaaactcctgtgctatacgatgaattaacattaaaagaacatttagatatgacagctatggcttatggacttgagcctcaaacatatgaagcccgtctgcagccgcttttaaaagagtttcgtttagaccggaagttaaaatggttccctgcgcatttttcaaaaggaatgaagcagaaggttatgattatgtgcgcttttttggttcagccgtctctttatattattgatgaaccttttttaggtttagatccgctgggtattcaatctttacttgatttgatgacggatatgaaaaagcaaggtgcaggcattttaatgtccacacacattttggcgaccgcggaacgctactgcgataaatttgttattctacataacggagaagtaagagcgcaaggaacgcttaaagaccttcaagaagaatttcagatgcgcaatgctactcttgatgaaatttatattgaattaacaaaggaagaaggctatgagtaagattgatgcattatggaagcaacggtttcagcagtatttagtggatgtaagaagatatacaaaatatatcttaaatgaccacattaaattagtgttaatttttgcgattggcggtttggcctactattatcaacagtggttgagtacattaacacctgcgtttccttcggctgtagtgattgcgatacttatgggattgattttaaccatgggtcaaattcaaacgtttttaaaacgacctgatttagtctttttactccctttagagacgaagctgcagccttattttaaaaaatctttttggtttacctttacgattcagctttatattttattatttacaactggtgcagcagcacctcttcacgtaaaggtaatgcatgattcttactcaaacgtttttgtgttttttctgctattactcatcttgaaagttgtaaacttaggcatgtcttggtgggctgtatggtttgaagaaaagtgggcgaagtggacagattatatcgtcaggtttttcttgaacgcagtttttacgtacttcttattttcccatgcatacgtattgtttacaggagtcgtagcggtgattatgattgcgctagctatttattatcgctcccttacaaaaagaaagccgatcaaatgggaaaagctaattgacttagaagaaaagcgtatgggctatttttatcgattagctaatttatttacggacgttcctcaggtgaaagagcgaatcaaacgccgtagatatttagattggctagtagcacgtattccatttcatcaaagtgccacttaccattacttatacaccagaacatttttacgatcaggagattatttaagtttgctcgttcgcttaactgtcattggcggatttttaattgtagctgcgccgtttcaatacggcaatatagtggttgttttatttgttatatacatgacgggttttcaattactcccgctttggaagcagcacaaacagattttatggctttctctttatccagttgaagctaaagaacggaaaaaggcatttttggacgtatggaaaaaagcgctgtatgtacaaattcttgtgctcgccatagcggtggctttttctaatatagttgctgcactgctttctgtggcagcaggtgctgtatttattcacttatttgtacatgcatatgtaaataaaaaattaacgtaaaaaaaagctccgaaaggagcttttttacgtttttagactactttggagacgaagataatatacggaagcgatagacgttcattgctacttttgtgagatggtcaagaagctgataattagcatatgcacctataacagctccaattcccggcataagttgaaacattttcacgacatcaatgtaatcacggtattcttgttgaaaagctttccaatcaagctcaagaagttcctctttcttttcttcccagttttctactacttcgagcagcttcgttctatggtcgtcgctgcaaaaggcaagatgaaaaatatacagcatataaatgcgttcttctttttcttttacatcaaaaccatatgtagcggcaatgtcaaataagcacttcatttttatggaaagaagaagcgggaaatctgctgcacctaaaaggataccgcctgcaccagtaccagctccttctacagcagctgtttttttgtacttaggtatgagttccaaaattcttttctctttttcttcaaacgaaagaccgctgacatctctttttttagtggtgaaatcggatccaacaagcgtggtttcaaccattttttttatgctttcagtcataatcttatggactttagcagggattttttcatttattttaagctgtaaagattttgcggtccgttgaaatttagaaggtcgtttcaacatgctgaatttccaatgttcagcttcttgtaacactttttcttcatacgtattcaaaaaaatcacctcatttcagtcgatataaatactacgttttaagtgtggaaaaggttcctgaaataaaacaacaagcactcgtctgcttatctgtacgaatgcttgctgaatgattaattcgcttttattacgtttttagaaggagcttgttctcttaaatactcaacagcagccgtaccaagcgttttagctgcgataagcattgctttttcgttaaaatcaaatttaggatgatgatgaggatacggagcatctacaccttctggctgagctcctgtaaaaaagaacgttcctttaatatgctgcaaataataagagaaatcttccccagtcatgtgaggctccgtttcttcgactgtatgaacttcatcgatttgagaagcagcagaagcaagaaaggccgtttcttccgggtggttgacgacggaaggatagccgcgcgtataactcagttcataagaagcatcagctgttaagcatgtaccttggacaattcgttcgatttctttttcgacatcatttcgtacatcttcattaaatgttcttaccgttccaattagtcgagcagaatcagcaataatattaaatgcattttctgctacaaaagaacctatgctcacaaccgctgaatcaattgggtttacacgtctgcttacaatttgctgtaaattaacaacaagctgagaggcgatgacgattgaatcttttgttttgtgaggctgtgcaccgtggccgcctgctcctttgatcgtaatttcaaagcgatcagcagcagccatgatagggcccgttcgatattgaacgacaccagttggagttaatgaccataaatgcgttccaaatatcgcgtctacaccgtctaagcatccgtcttcaatcatggacttggcgcctccgggtgcgtactcttcagcgtgctgatgaatgaagacgattttaccagggagagaatctcttatttcaaaaagcgctttagcaaggactaaaagagtagccgtatgaccatcgtggccacatgcatgcattacacccggaacagttgattgatatggtacatctttttcatcttgaataggcagggcatcaaagtcggctctcaaagctacagtaggaccggggtttcctccttgaatgcttgctacaatgccgtttcctcctacatttgctcggtaagaaataccgattttatcataaaaagatcgaatgtaggcagcggtttgaaattctttaaaagacggttctggatactgatgcaaatatcggcggatttgaaccatttcatcaaatttttcttcaagtaaagtatgtagcttggaattcacgtgaccatatcctttctgtataggttgaataaagttttgaattttttgacattttaatcattatatcattatctattaaaaagaaaagaatgtaagcgttgttattgaaaaaagtaattgaatcatgaaatattttatatacataatagatacataagatgaggaatagggataaagaatgagttttttgccaattttctcatgagataataggaggtaacgatatggtagattcacaaactgtatccctgtacaaaaaattgatgtgggtgtttgggggggcaggtctcgtttttttaggagtgttgtttgttgtgtcgacagattcttttcaaggagaccactggcttgtttcagctatagatgacagcactgttcttcagtcagcatcatctatttttcatggcttgtcttttttagcttcgaaagtgatgattatggttcttttagctgtacttctcgtttttttattttttaaaaaggactatatcggtatgatatcggcatttttacttattttaagcggtgatattattaataaagcagttaaagatgcggtagaacgaggacgtcctcttgaaggcatcaaaggctacagttttccgagcggccatgcaatgatgggaattcttatttatggtctgattatcttttttctcacaaagcatatgaacagtcaaaaggtagccaagcggtatcagctggcaattactttaatcgttttattaataggtgtgagccgtattctattaagagaacattttttaacagatgtcttagctggctacaccttagggcttatgtggcttattgtaggcattttcttctatacgcttgtttatgcgtatgtaaagccttcagcggaaaaagtgtttccaaaaggcatgtaaaaaatatatacatatggcccccttcataaaaagaagggggcttttgtttaaactaagaacatcgcgacagttgttgtaacgactaatccaatcgctacaggttttaaattacgtctggcgagttcaaacggactgactccgcaaatcgcagcagctggaatcaatgcccatggaatcaatgtgcctccaccaacccaaatcgcagcaatttgccctaaagcagttagggtggcagcgcccgatcctaaagcagatgcaaataaatgagagacagagcctacaagtgaaatgcctgaaaagcctgaaccgtctaatccggtaatagctcctagagcagttatcgttacagtggcgacctgtgcggttaacggcacagtggaagcaagcgcaacgcctaggtcatttacaagtccatgtgatcctttcggaagaaagtcaccaatgattgttgtgaatccagcatctcctaaatagaaaaaagctgcaatgggaataacgggaccgaatactttaaaaccaaactgcaagccttcaattaagtaggaagttgtttgttcgagaccttttcctttgtgagcaataagtgaaaccaccactaaaataaatagggctgtgccaccaacgagagcggtcgcatctcctccctgtaaatgaagggtgaacattgcccatacgtctatagcgaagaaaaggggaactataatggctaaagcccggcgtattgaagaagaaagaggtgtggattggacagaagaactgtttgttaacattgtcggttgaacgtgaattctattgtgcttcatatcttgttttaaaaagtaaaaagcagagagtgtcgtaacaactcccatcacgatgaccagagggacacttgcttgaaccacctcgtgaactggaagacctgctgcgtcagctgttatcttaggagcagcttgaataacaaagtctcctgaaagcgcaacgccgtggccgaataaattcatcgctacagctacgcctatagctggaagccctacgcggatggccactggtaaaagcacggctccaagtaaagcaacggctggagaaggccagaaaaaataggagatggtcatcataactaatccaataacccaataggcaagagcaggtgttttaatgaggcgagcaaaaggtgaaatcatcgattcatttattcctgtagccattaagactttactcatagatacaataattgaaataattaaaatggtaggaagcagttctgtaatggcataaatgaagctggaaaaaacagcgctgacggagtggcttaacgaagaggtagctgttaaggaaagcaaaaaaatcccgagtatacaaaggatactcgtatctcgccgcataatcataaagccgataatgaaggcgataaaaaggacatacatccaatgaagagctccaagctctatgcccataaaaattcctcccaataggtgatgtagtatacaatatgccgtttgtgcctattgtgatactcgcctactaggagggtgtttacttatttaactacgtggtatgaggtcacataagaagggcgagagaaaatcgacggctgctgatccacgccttctgacgtaccgcgttttttgtgtgcttcattataggcttttgaagactgccaatcgctaaatgaactttcatctttccatcctgtaaagataatatatgtgtcattttgcagtggacgaagcacacgaatagctgagaagcctgcttcattttcaattaaacgagctcgttggctaaatcgctgttcaaacaaaggacggccctcatctgtaactgaaatattatttagtacagcaaatccgctatctgcaagatctccagaagcatctaatacctcataagcatgtccttctttaaaaattgtatctccatctgtttcatgaactagtgcaaattgatcgtcatctttgtgaagcagtaacaaacgttcactcggatgttcgtcgatcaacttctgaaggtaagggcctgttccgtaagtaataaagatcttcatggattatacttcctttctaattgggaattgcatacaatttacaattgtaaatcatactaaaattataaaattttacacacaaaaattcaaaaattgtgaacttctaatgaagatggtaaagtaaaacattgatgaagttgttttccatattatcaaaagtttagcgaaagaaaaggggtggcacgatgtacaaaaaaggcttatacgcaattgctgccttagttggaatttttctattaggattgatcggatatattatcatcttgtttcttggaaactatgtaattgatgagaaaaagatcgtcatggacttggctacgaggttagtggacgaaaatggagacgaattaacaaagctctatgtgaaaaatcgggacttggtttcaattgataagattccaaagcatgtgcaacaagcatttatttcaattgaagacgttcgtttttatgaacaccacggaatcgattttaaatctattggtcgagcattataccgagatatattggctggaggaagtgttgaaggaggaagtactttaacacagcagctggctaaaaatgtgtttttatctaatgataaaacgctgcttagaaaaacaaaagaagtagtggtggccattaacttggagcagcgttacagtaagcaaaaactgcttgaaatgtatttgaaccaaatatactttggacacggagcctatggaatccaagctgcatccaagctttacttcaataaagatgtctccgaattaacggtagaagaaggtgcactgctcgctgcactgccaaaagcaccgaattcttattctcctattttacatccagaaaaaagtatagaacgtagaaatgttgtgttaaatgccatgcaaaaagcaggttatttatcagctgaaaaaaatgtccgtttgcaaggaagaacgctggggttgaacgtaaaggaacaggctaaaaacccagcgtatttaacctatatcgatatggttattcaagaagcagagaagaaatacagcatttcgagcaatgagcttctgcgcggcggttatacggtcaaagtacctatgagtacaaaagtacaagaagccgcctacgaactgatgaaagaaaatcgttattttccaggtacagataacagtgcccaaggtgcttttgtattagttgataacaaaagcggaggagttttatctgttatgggaggacgagattatgtacaaaaatcgctcaatcgcgtaaatgtcaaaagacagccaggttctacgatgaaacctattgcggtatatggccctgcgttagaagaaggtcaattcaagccttattccttactgcaagacaagctgagaagctacgggggatacacacctaaaaatgtagacggccaatatgctaaaaaggtaacgatgtacgatgccctaaaagattctaaaaacgcagctgctgtctggacattgaatcagctaggagttgaaacaagtaagcagtatctcacaaagctaggaattcctttagaagataaaggacttgcgattgctcttggaggattaaaggaaggaattacaccgcttcaattagcaggagcgtaccgggcatttgctgaaaacggagaaaatatccaaccgtactttattcaagaaataaaagatcaagacggaaaagtgattgcaaaagctgttcccgacactcacaaagcattttcaaaacaaacggcttggtatatgacaaagatgcttcaaggagttgttaaagaaggaacggcaaaaaatggagagtttacaggagagttagcaggaaaaacagggtctacttcgtatacgaatgttaaaggagccacgagggatgcttggttcgttggatatacgccagacgttgtaggaagcgtgtggatgggatatgactctacaaatgatcagcattatttaacaaaaggaagttcttatccgactctattatttaaagacattctcacaagagctggttacgacgaagctgcatttcaaaagccagcaggcgttaaagatttgccaaaaccaatacgcttagagcaagttaaagacttaaaacaagaattaacattccatccatttggtttgctaacggtaaatttatcgtggacaccttcacctgataaaagagctgtttattatgtttatgagaaaaaaggagataaagccgaagtaattggcaaagtgaagggaaaaggagcatttgagaaagagcgtgtgaatctgctcgacagtcctacttattatgtagttccttacaattcccaaacaaaacaaaaaggaaaaaaatccaacgaagtaacacctgctctttttcaataaaataaggaagagtagggcgaatttttgacatttttagcaggtggctatacaagtcgtaaagaaatgggtatagtgacaagtagagaatataacgtgaaactttaatcagtagaggaaccagtatgttcctttgctgattattgtctgtctaatcgaagaaaatacggatggaagacaatcgagaaaggtggaaattatgagtcaaggaacgtttaacgatacttttttaaaagcctgtagaggggaaaaaacggatcatgttccggtttggtatatgcgccaagcagggcgttcacagccggaataccgaaagctaaaagagaagtactctttatttgaaatcactcatcagccggagcttggggcatacgtaacacgcctgcccgttgaacagtacggagtggatgcagctattttatataaagatataatgtcaccgcttccttcaattggagtagatgttgaaatcaagtcaggaattggtcccgtaatctctaatccaattcaatctttaagcgatgtagaaaaactaggagaaattacgccggaagaagatgttccctatgtattagatacgattaagctgttaacaacagaacagttaaacgtacctctaattggctttgcgggtgctccttttacagtggcaagctatatgattgaaggaggaccttcaaaaaattacaataaaacaaaagcatttatgtataccgaacctaaagcatggtttgcactaatggataagttagcagatatgacgattacatatgtaaaagcgcaaattgacgctggggcaaaagccattcaaatctttgattcatgggtgggtgctttaaacgtagcggattatcgttattttataaaacctgtcatggagcgaattttcacctctttacgtgaaaaaaatgtaccgctcattatgtttggagtaggggcaagtcatttggcaaaagaatggcatgatctgccgctggatgtagtgggattagattggagaacacagctggatgaagcacgtgcattaggcttaacaaaaacactgcaaggaaacttagatcctgctattttgttagctccatgggaagttattgaagaacgcgtaacagaaattttagataaagggatggccagtcctggttacatctttaacttggggcacggcgtttttccacaggttcagccggaaacgttaaaacgtttaacaacctttattcatgaatattctgcaaatagacaataaattgtcaaataatttggagcgctaaactttgaatttttctttttattcatggcaaaatgaagacaagtattgaatctaataaagaggtgtcgaacacatgagtaaaaaagtaatgggattacttgtaatggcatatggaacaccatataaagaagaagatattgaacgttactatacacatatccgccgcggacgtaaaccttcaccagaagccttagaagatttacaaaaccgctacgaagcaatcgggggcatttcacctcttgcaaaaattacgcaacagcaaatggaaagtctggaaaagcgcttgaatgaagtgcaggatgaaattgaatttaaagcgtatcttggcttaaagcatattgaaccgtttgttgaagatgcagtagaagcaatgcataaagacggaattaaagaagcggtcagcattgtgcttgcacctcacttttcaacgtttagcgtaaaatcctataatgggcgcgccaaagaaacggctgaaaaattaggagggccaatcattcattcagtagaaagctggtacagtgagccaaagttcattcagtactgggctacacgtgttaaacaaacgtttgatttaatagacgaagagaaatgccaaaaagccgtgttgattgtatctgcacatagcttgccagaaaaaattattgcagcaggagatccatatccaaatcagcttcaagaaacagcggatttaattgcacaagccgctggcattgaacattacgaaattggctggcaaagtgctggaaatacgcctgagccatggataggtcctgatgtccaagatttaacaagagaattgcatgaagaaaaagggtatacatcgttcgtgtatactccggttggatttatcgcagaccacttagaagttctttatgataacgactatgaatgtaaagtggtgacagatgaaattggggctgattattaccgccctgaaatgcccaatgcacagcctgaatttatcgatgggttagctacagttgtgttaaaacagattgcccgctaagtcaatatagattctttgtacattgaacagggacgaaaagtaacttataatcaatatagagaaaagtaagaagcgagctatggatttccataatcgcttctctttatattgaattttacagaaaaggcgatgataacatgacggatagacgaaaaaaggttgtcatcatcggtggaggaataacaggtctttcagctgcctattatgtgcaaaaaaaaataaaggatcatcagctgccaattgatcttcaactaatagaagcgacgcatcggcttggtggaaaaattcaaacggtcaaacgagacgggtatttatttgaaaaaggtcctgattcatttttagcgcgtaagctagctgctacaaaactggcaaaagaagtagggttaggtagggagctagtcggaaatgaaaaggggaaatcctatattctagtaaaagatacaccgcatgcgctgcctgatggtgctgtaatggggataccaaccaagttatctccttttatcacaacagggttattttcacctgttggcaagctgcgcgcagcagctgatttttttataccgaagacaaaaaatcaggatgaccgttcgctaggcgtattttttagaagacggtttggtgatgaagttgttgaaaatttgattgagcctctattatcaggaatttacgcaggagacgttgatcgtttgagtttacgatcgacatttccacagtttctgcatgctgaacataagtacagaagcttaattgtcggaatgaaaaagctaaaagaaattcatccacagcacggtgaggattcggagtttaaaaaaaatagcgtctttttaacgttaaaagaaggtctgcaatcgctagtggatggggtagaaaaagcaatagaccctgatattattacaaaaggaataaaagtagaaaaaattcacaaagaagataccacatacgaattatcgttaaatagcgggaaagtaataaaagcagatagcgttattgtaacttctcctcatgcagctgctcagtctatgctttcggaatataaaatatttgaaccgttgaagcatatgccttccacttcagtagctactgttgtgatagcctttgcacaagaagcgctgcaagacaatctagatgcaatgaacatcgccgtttcaagaaatagcgattacacgattacggcgtgcacatggctaaataaaaagtggccgcatgcggttccggaaggaaaagtgctgctgagatgtttagttggacgaaccggggatgaagctgtggtggatcagcctgacgatgaaattttcaaaattgtcctggaggatttgaagaagctcattacaatttctgctgagcctgaattttacgcggtaacgagatggaagcagtcaatgcctcagtatacggtcggacatcacgatatgctagatacgatgaacgaacagcttgaaaaagagctggccggtctttatgtagcgggaagctcatacgaaggtctgggtataccagaatgtgtagagcaaggagaagatgtggctaaaaaagcggttaaatatgtgcagcaactgtagaagtggagcggtgaatcaatgctccgcttttttgtctactacctgtagagaaaggttatactaagagaaaagattgtggttgaaaagcaaaagaaacttatgctatagtaaaaccgtacttgttgactgaaatattcatttggtcagaaagaaggggataacgtggctatagaccgaaagcaatcagttgttgatgcagcgtcaaaatcatttgcgctgtttggatataaagcaacgactatggagcaagtggcgaagcttgcaaatgtcggaaaaggaacgatttatactttttttaaaaacaaagaagagttattcgatgaaattgtgacacgaatgattcgagaaatgacagatgcagctgaaactgtcattgatagcaaccgtcctttttttgaaaatgcccaagcagccatttttagaatcttggaattccgcaccgagcatcagctcatgctgaagctggtacaggaacagcagttaggcactacagcagtgcaagaagtgctggtgcgagtagaagaagagattttgacttatataaaaaacaaaatcgaaattgcaatttctaaaaaagaaatcaaaccgtgcaacccggagctcacagcttttttattatttaaaatgtacattgcactcgtctatgattgggaaaaacggcatgagccgctttcagaagaaaaaattgctgaattaattgaactatactttttacgcggtctgtctcagtgagatgggcttttttcatagagaaaacaaaaaaggtctcatgacgagacctttttttattgttcattatcatctttttttacgccgtttaattctgtatttcctgtttttgcatcttcttctttttgctctacttctttttcgccttcttttttaagatcgaagtaagctttaatagaatcgcctgtaatagttttacttaacgtattagatgtacctgctacataagcagaagggatgacaactgctactgctacttccggattatcataaggcgcgtatgaaacgaatgtagagttacggacgcttacgcctttgttaaaggtttcagctgtcccggatttaccagcaatgttatactgacgatattttccagtgttaagtaaacgccctgtaccatgtgagcttgtgactacgcggcggaagccttccttaacaatgtcaatttccgattggctcattgtaatacggtttaatacttccggctcaaaagagctttgtacgcttccttttagttcgctatcaagctcaggctcacgaatttcttttactagatgtggcttcatgcgatatccaccgtttgcaatcgttgaaatgtattgaacaagctgaagcggtgtgtacgtatcatattgtccaataccaaaatccagcgctttacctggttcatttgttacggtattgcgaataccggttgattcgttttctaattcgatgcccgttgaaattccaagaccaaactggctatagtatgagcgcagcttattaaagatagacggtggaatgttcagtctgccgccagggcggtacgtttcaccagccatgctcataaccgtgcggtacatgaacacgtttgatgattgttctagagctttttggattccggtagctcccatattatgtgaagactttttcttagtgcctccagcaaatgtcatcggtgcatcataaaacaccgttccgggctgaatagcgcctgagtcaagacctgcaagaacagtagctccttttacagccgaacctacttcataagaagtggtcatgttaccaagagcaaaatcttgtacttttcgtgctcccgtctttttatctgtaacgagctgttttccacccattgctaaaatgtctcccgtgtgagggtccatcataatagcaaacgctcggtccattaatcgtgaaccagctgctccagatgtcacagcttttgttaaaatatcttcgacttgtttttgaagttccatatcaattgttaaaattaagtcactgccgcgctgaccttcagtaacggtctcttggctcactaggttgccagagcggtccgttacgttttgcacgcgggctttttgaccgcgaagaacgtcttcgtactgcttttctaaataactttttcctactcggtcgttacggctgtagccgtgtgataaatagtactgtaagttttcgcttggcaatccttcatcagctgatgtgattttaccaagcagcgtgctaagtaagccgtcgtatgtatacatacggtcccagtaagttgtcgtatcaacgcctggtaattcacccagctgctcactaatgacggcaagctctttatcggttaatccgcttttaataatttgagcggttaacgcgtagccgccttccatcttacttttaatagcaatcacttcaaggtcatctttcaccgataaaagttcgttttttgtgatgcgctttagctgaagagggtataaatcgtcttcagaaagttgaccttcttttactttttgcttatccgctgcggtaatttttttcgctgctgcttttggatgagttgcaatccagtaatcttttaagtcgcgttctgttagcttaatcgtatttttatctttctttttattcgatttgccaaacacgtctgttgtaacaggaacatcaataagagtagcaagctttttagctacttttagcttgtcttcttgagtgacgcctttcaaacgcgtgtacgtgacagcgttcaacggtttattatccacgataacgcggtcatagcggtctagcatctttccgcgaggaaccggtgaatctaccgtttcatcttctgttttttcaacttctcgtttatagttctctccgtacacgatctgtacgaagcctaatcgtaaaatgagtgcagaaaaaagcaggaaaaccacaataaacagccagttaattcgaaatgagacatgtgtttttttgcgctttttagttttcatgtaaaccccttcactttgtttatacaagttaaaaaattcataaattttcttatgaatctatcactctacatattaacataattttgtctataaatgttattaggtggaataaaacagacaaaaaatttatagaaatttttgcgaaagaagagagatctgtcgaagggtgctgaagggagtgttcaatattttccactcggttgttcaatattgttacctgttcaaatgtcctagaatcggtaaaataaagagagatagatatcaaggggggcaaaacgaatgaaaatgaaaaggctttcaataatgtctggcgtgttagcaacatcacttttatttgcgacagcatgttcaaactcaggtacggattcaaaagcaagtaaatcaacaggctcaggtgatcaagttgttattgatatgttccagttcaaagtggaaattgcagatcagctgaaagaattaacggatgaatacacaaaagaacatccaaacgtaaagtttaacatccaaacagtcggcggaggcgcggactatggtgcagcattaaaagcacagtttgcctctggaaatgaacctgatatctttaacaatggagggttccaagaagcgcaaacgtggaaggataaattagaagatttatctgatcagccgtgggtagataatctgtatgatatcgccaaagaaccgatgacaatggacgggaaaatttatggtcagccgctaaacttagaaggttatggttttatttataataaagatttatttgaaaaagcaggcattaaagaattacctaaaacgctgccagaattagaagcagcttctaaaaagcttaaagcaaaaggaattacgccattttctaatggatacggcgagtggtgggtgctaggtaaccacttatttaatattccaatggcacagcaagacgatccagatgcgtttattaaaggtctaaacgaaggcaaggcaaaatttgaaggcaatgaaacgtttaagcaatttatgaatctgttcgatttaacgttaaagtatggaaataaaaatccactaacgacagactacaatacacaagttactcaatttgcttctggtgaaacagcaatgatgcaacaaggtaactggacggtaaatatgattacgaaaattaatccggacatgaaaatgggctttattccaatgccaatcagcaacgatgcaaagaaaaatgataaactagcaatcggagttccaaataactgggtagtaaacaaaaatgccccagatgcagataaaaaagcagcgaaggaattcttaaattggatggtttcttctaaagagggtcaaaaattcttagttgaaaagttcaagttcattccagcgttcaaaaacatcgatggaaaaggaattgattctttatctgatgatatcttaaaatactctgaagaaggtaaaacattatcttggaactggtttaagtatccggaaggaacggttcaagaagtcggcgcagcaatgcagtcttacgcaggtaagcaaatgacagaagaagagtttatgaagaaattagatacaatttgggcaaaaatgaaaaaataaacaagaagtccgcgtggaaaacgcggactttttgatgtgaaaaaatagctggttagattcataagttatgaaaaaataatagttaattgaaagcgcttttaatgtataataatagtcataatgtatgacattagtcaaaggaggttatttgtgaaaggctggagcatacgcaagaaattaattttgtttttcttattcgcaacggttattccatttttaatttcgacgatttttacgtatcaatacacaaaagaaacggttaagaaccgatttatttctaccaactatcaagttattaaaaatggaagcaatgatttgagcgattacttaaatgaaattgctaatattacaaaaaggctgtacggctaccacccatttattaaagtgttagatgaaggtgtatcaagtgacttaggagccaatcaactggaaatatcacgaactcttctttatttatataatactcgtccagagattgaacagctccatctttacattgaaaacgggcatgactcatatacagcttataattcgaaagtgagcagcagagggaagtatgatgatatttacactcagccttactattcttatttaaataaaaatcataaatttcttgtgattgagcctacccatgaaatttatagctacaataatttatcaacgttaattgattcactgccgaatcaagttattagctttcatcagcggattgatgagattccatcagacaagttgttagcttatctatctttagacattaatatgacacaaattcaatctatatcgcagcgtctatataatgaagagtcagaagatttttatttaatgaacaataaaggtaaggttttgtattcctctgattcaaaggttattggaaaaaatgaaaactacgcgtgggtgaaggcgctcacttctcaaaaagaccatagtatggaatgggaagataaaagcttctcaggcgtattaatgtatgaaaagcttaaacagccctttgaggacttgtacatggtgaaacgaattccttacagtgttttatatgaggatgcaagaaagacagcacttatgaatgtattaattggcctgccatttttgtgtatgctcgttatcgctacgctttttatatcagtacgttttacacagccgattaacgtattgattcgcaatatgaaagaagtggaaaaaggatcatttgaggtgcggtttaagtcgcttggaaacgatgaatttggtgttttaggaaggcattttacctctatggtagaaacaattaatgacttgattgaacgtaaatttcgattggaattagaaaataaatcaacgcagctaaaagtgctgcagtcacaaattaatccgcattttttatacaacgcatttcaatcgattggaactcttgctcttaagcataaagcagttgaagtatattctttattaacctcactttcccacattatgcgttacagcatgaatatgaaagaggatatcgttagcttaaagcaagaagtcgatcacgtaaaagctttcttaagtctgcaaaagcagcggtttggttcaaagtttgagtatgagttaaatatcgaaaaagaagcagagcttatgcgaataccgaaaatgattttgcagcctcttgttgagaattcttttaagcatggattagaaacccgtacaggaagcggaaagctgttgatttcagcggagttgaacggtgaagaactgattctaactgtttctgataacggaaaagggatagggcaacaagagttgaatcaattaaaaacgagacttcagcaatcgtataatcaaacagatgagcatattgggttgcaaaacatttatgaacgacttcgcatctactatggagatcatgcttcaatgcaaattagcagtcaagaaaatcacgattttaccgttgtcataaagctaacaacaattgaagaaaagagggatagtgatgaaagtattaatcgtggatgatgaagagcatgtaagagaaggaataaagctgcttggacagtgggaagagcatgaaattacagatgtgatagaagctgatagcggtgagcaagcgattgcgcttatcgaggatcatgaaccggaaatcatttttactgatatgaagatgcctaatatcgatggaattgctttgttggagtggattaaagagaattcaccttctagcaaaacgattgtggtaacagggtatgatgactaccactatatgcgtaaagctattcattttggaagcacggattacattctaaagccagtggatccttcgattttaaacgatacgcttgtacgagctgtaacccaatggaagaaagaagaagagtccagaaaagttcataatagcagctatcgtttaatcaatgaaatgaagccgatttatcgagatcgaaaactgacgcagttaatgaacaattatttgctaaatcaatcaatctatgaagagtttggtttccatctgactagagaatatgaagtggggattgtacgtgtagatgaatctatcattcgttcttttggcggtgaccgggatttagcctatttttcaattttaaatgtaatcaatgaaatgctgatggaagaagaaaatggggtagccttccgttatttatcaaataagtgggaaattatcattatattttggaatgattttgaacgcataacctctttactgacgactttacatacagccattcgccgtacgttagacgtgagctgtcggattgcaagagggtgcaaagtttcttctattgatcagctaatgaaatcctatgaagatgcgaaaaattcgcttttattaagcaatgttcttgatcaaaataaagtgaaggtctacggcgagcaagacgttttagcaagtgctttattaataaatatgatggactataacagtaaaattgaagaagcgctgcaagtcgggaagtttgaagcctttttgccggtattcaacgaaattatcacagcttttgaagcacaaaattatctctcattaaagcaaattctgcattttgagcaggaatatcagctgttaagtcagcattggttaaaaagatatcacattccttatacgataaataacggtcctgaatatgtcctttctttcttctataaccaagatgggcagtttcagctagcaaagtatgtagagaggaagaagcgtgaagtaaagcgatttttaaaagtagtaaaaaggtatagcaagcaaaacaatcgcgacgttatttatgaaatcgaacaatatttgcagcaaaattttcatcgagatgtgaagcttcaagaaatatcggaacgtttctatctaagccgtgaatacatttcgagaaagtttaagcaagaatttcaagaaaacatttcagattatatggtgaaagtcagaatgaataaagccaaatcacttttactaaatgaagaactaaaaatctatgaaattgcgaatatgattggatatcatgatgataaatactttcgaaaagtgtttaaaaaagtagaaggcattacgccaaatgagtatcgcagtttgaccgtataaaaaaagctgaaactgttttataacagtttcagctttttttatttcatgatatctagacagtgatcacatttgtttccgtagcattcatgctgttcctcaatgtcgtttccgcattctacgcactttttattgggtaatcttttgaaaaattcagtcattttttctaacattttaaatcccctccgttgtttttgttactaacattgtattataacagatgataaaatgtcaattatgttttataacaatttagcctattttgctattctaagtggttatttgttatataacaatgagttatttcgataaaatgaccgaaacgagtgtctttcagttagttttcaaaaaaaagtagggtatactgaacgtaataaaaatagtacgaaagggtgattgaaatgaaagtaactgttattggtttttggggaggatatcctgcggtttcagaagctacttctagctatttagtggagcacgatggatttcagctgcttgttgattgtggaagcggtgcattggctcagctgcaaaaatatgcaaagccagaagaaatagatgctatgattttatctcattatcatcatgatcacgtggctgatgtcggagtatttcaatatgcacgcctcattcagactcatctaggaaacgctgttcaggaactttctatttacggacatacatatgatcaggaaagcttcaacaaacttactcataaaggaattactaaaggggtagagtatgatccgagtcaaaaacttgaagttgggccttttaccatcgaatttatgaaaacgaaacatccagtcgtttgttatgccatgagaataagtgccggcaatcaaactgtcgtgtacacagcggactctagttatttagaagagtttgtttccttctcagaagaagcagatcttcttatttgtgaatgtaatttttatgccaatcaagatggaagaggcgctggacacatgacaagcacagaagccggtacacttgcttcaaaagcaagtgtcaaacacctcatgcttactcaccttccgcactatggagaacatcaacagctagtagaggaagccgctgctcattatagaggtacgcttacgttagctgaatcaggatatgtatgggaataacaaggaggaaaatgaatgttatttattgataatcaaaaaaattatgatccccgaattaacttagcaattgaagagtatgcgctcaagcatctagacattaatgagacatatctgctgttttatattaatgaaccttctattattattggaaaaaaccagaacaccattgaggagattaatacaaaatatgttgaagatcagcaaattcatgtagtgagacgtctgtctggaggcggtgccgtttatcatgataaaggaaatttaaacttcagctttattacgaaagacgatggaaatagctttcataattttaaaaaatttaccgagccggtcgtggaagcgttaaagaaattaggagttaatgccgaactaagcggacgaaatgatttaatggctgaaggacggaaaatttctggaaatgctcagttttcaacgaaagggagaatgttcagccatggaactcttctttttgattcagagattgaaaacgttgtatcagcgttaaaagtaaaaaaagataaaattgaatccaaaggcattaagtctattcgaaatagagtagcaaatatcagcgaatttttagaacagaaagtaacggtggaagagtttagagaaatgctgcttcgatatatctttgacggagaagaaaatataacagaatataaactaacggaaaaagattgggaaacgattcatcaaatttctaaagagcgctatcagtcatgggattggaactatggaaaatcacctaaatttaacttacagcactctcaccgctttcctgtgggacaaatcgacgttcgtttagaagtgaataaaggaaaaatcgatgcttgcaccatttacggagatttctttggagtgggggatgtccaggaagtgcaggaaaaattaacaggtgttcgttatgaaaaagcttctattgaacaagccttagaagacatcgatattccacattattttggtaatattacaaaagaagagtttgttgaattaatctattaagaaaaaagtctgctacatcaggctttttttctttttaaacagatgagtcttgtcaatagaacagcagtaacattataatagaatagaagaagtaagaatttttacattattatgtcttaataatgaatgggtgttcattcattcattattaaaaggaggaagttatgagatgaatttgtcagcacagcttcataaaacagctgagcaatttccacaaaaatcggcatatgtttttatggaccaggaaacatcttatgcaaatcttgatgcatcggtatctaagtttgctgatggtctgaagcagttgggtgtaaaaaaaggagatcatatcgctttgattgtcggcaactcgcctcattttgtgattggattgtacggtgctcttcgagtaggagctactgttataccgattaatcctatttacacagcggatgaaattagctacatgcttcaggatggagatgtaaaagcagttattgcggttgatttacttctccctattttaaagagaatcattggacacgctccatttttggaacacgttatcttatgtgaaacgacagatacagtggaaaatataccttcttattttcacacgttttcgcaagttgtaaacagaggggaagctacatatgattttctggagttaagagaagaagatgtggccctcattctgtatacgtcaggaacaactggaaaaccaaaaggagctatgcttacacataagaatatttattcaaatgctcaagacgtagcagattatttaagtataaatgggaatgaccgagtcgtagctgctttgccgatgtttcacgtattttgtttaactgtttcattgaatgcgcctttaatgaatggaggaacgatattaattgaaccaaaattcagtccatcttctatatttgaattaattcaaaatcgacaagcgacgatttttgccggcgttcccacaatgtataatttcttacttcagcacgacaaagggaaaaaagagcactttcacacggtaaggctttgtatatcagggggggcatcaatgccggtggcacttctaaccaattttgaacgtaagtttggggtaatggtagcagaagggtatggattatctgaggcttctcctgtgacgtgtttcaatccgattgatcgagagagaaaagccggttctataggcacatctattatgaatgttgaaaataaagtggtaaacgaactaggagaagaagtagaagtaggacaagtcggcgaacttatcgtcaaaggccctaacgtgatgaaagggtattacaagcttcctgaagacacggaatatgctctccgagatggttggctgtatacaggtgacttagcaagaatggataaggaaggttatttttatatcgttgaccgtaaaaaagatttaattatcgtaggaggatataacgtttatcctcgcgaagtagaagaagtgctatatgcgcatcgggatattgtagaagtggctgttattggagtccctgatccttccttaggtgaatgtgtgaagtgttacgtggtttgcaataatcaagagataacggaagagaagcttattgcctactgcaaagagcaccttgctaaatataaagtgccaagtgaaattgaatttttaaaagaacttcctaaaaatacaacgggaaaaattttacgtcgtgcactgaagcaacaagtatcccaggagtgataaaatgaaagcgattccaatttggaggtggtaaaaggatgtcatctatttcttatgaaatgaagggacacgtcgcccatgtgatactgaatcgtccggaagcgatgaatgcttttaattacgatatgcttaaagaattggaagaagtaattgaaggaattcgtattgaaaaagatattcgagttgtgacgtttaaaggggcaggggaaaagtcttttagtgtaggggccgatttaaaagaacgtaaaactctctctgatcaagaggtaaagcgcaatatttacaaaataggagaagtgttttcgaagatagagcagcttcctcagccaacgatagcaatcatcaatggatatgcatttggaggaggaatggagctggctttagcatgtgatttccggattgcttcaaccgaagcgcttatgggtttaacggaaacaagtttagcgattataccaggagcaggaggaacacagcgtctccctcggttagttggggaagcaaaagcaatggaactaattttaacagctcagcgtctctcagcatcagaagcgaaagaatgtggtctagtaacgaaggtggctcccggatatgaaatagaagaaacaatagatatttttatctctcttttattgaaaaatgggccaattgcacttcagcaagcaaaatttgctatcaaagaaggaatgaaggccgatttgcagactggtttgcaaattgaacgaaaagcatatgagttaacgattccgacagaagatcgtctcgaggcgcttcaggcatttgctgagaaaagaagacctagttttaaagggaaataagaaagggctgtctaattgacagctcttttttagtttcttctataagaaaagaataataaaaaagaatatgtgaaagcgcaggaacaaagaagacaaagttacagctggcttttgtctataatatttactataatacgttgcagtagtcgttgttcaaatctataaataatagtttttaatttttttctttaaaaaccattgactttagttaaaatatattttattattataaagcgtcgttgagacatatcgttaacaacgaagctaaaaaaagaattttaaaaagttgttgacattacgttgataacttgataagatgataaagtcgcttaagagcggcggttgaactttgaaaactgaacaaagcgacaaacgtcaacgttaaattttattttttaattgagcaagtcaaacatttcttcggagagtttgatcctggctcaggatgaacgctggcggcgtgcctaatacatgcaagtcgagcgaactgattagaagcttgcttctatgacgttagcggcggannnnnnnnnnnnnnnnnnnnnnnnnnnnnnnnnnnnnnnnnnnnnnnnnnnnnnnnnnnnnnnnnnnnnnnnnnnnnnnnnnnnnnnnnnnnnnnnnnnnaagaacaagcagcacaagaacaaacgcaaaaagaacaagagcaagctcaagcagcacaagcacaggtagcacaagagcaagcacaaaaagaacaagagcaagctcaagcagcacaagcacaggcagcgcaagagcaagcacaaaaagaacaagagcaagctcaagcagcacaagcgcagcagtctcaaacggcacaagctcagcaagaacaagcagcacaagaacaaacgcaaaaagaacaagagcaagctcaagcagcacaagcacaggtagcacaagagcaagcacaaaaagannnnnnnnnnnnnnnnnnnnnnnnnnnnnnnnnnnnnnnnnnnnnnnnnnnnnnnnnnnnnnnnnnnnnnnnnnnnnnnnnnnnnnnnnnnnnnnnnnnnaatctcttgtctggtggcgatagcgaagaggtcacacccgttcccataccgaacacggaagttaagctctttagcgccaatggtagttgggactttgtccctgtgagagtaggacgttgccaggcaatgaataagacccctttttatgctcttataaaagagtctaggggttttttatttggctcatttataaaaatcttttatacaatgaatattgtgtatgatacacggaggattagctcagctgggagagcacctgccttacaagcagggggtcggcggttcgatcccgtcatcctccaccaccgtgccggtgtagctcaactggtagagcaactgacttgtaatcagtaggtcttttaatcagagggtcgaaggttcgagtccttcatggctcattttaataagcggaagtagttcagtggtagaacaccaccttgccaaggtgggggtcgcgagttcgaacctcgtcttccgctccatataaagcgcccgtagctcaattggatagagcgtttgactacggatcaaaaggttaggggttcgactcctctcgggcgcgccataaacgggaagtagctcagcttggtagagcacttggtttgggaccaagcctgataagcgtgaggtcggtggttcgagtccacttaggcccaccatattccacagtagctcagtggtagagctatcggctgttaaccgatcggtcgtaggttcgagtcctacctgtggagccatactggcccgttggtcaagcggttaagacaccgccctttcacggcggtaacacggggtcgaatcccgtacgggtcatcttaaaagcagtttgcatatgcaaactgctttttttgtttgtaaacagagtttattcttttgtctaaactctattttccgtttttctatgatttcctcgccccaaattgcatttcttatagcatatctataaacgcttgttctaaatttcgaaaaaaaacctacaatagtaataacggcatactgtttgtacaaaaggaggggaatgcgtgaaaaaaattttttggtggtccatcggagtttttcttgtgtatggagcgtgtatttgggtgtatttattctatataagcgatacctctattccacaatcattaaaaggcaccagcgtagacccagctacgtttatgaatgcacgagaacttatgttgaccgaaaaatattcaaaaattagagatgcgctcttttttatccgaattccatatgagtggctagggtttatcttaattttagtgttaggtgtgtctaagaaagttaataagtggtctaaagacgtcagccgtttcagtcttctccaaactgctatttatgtattttggttatctgttctgctgctgatctattctttccctatggactggattagctataagctttcaaaggcttatcatattacgacgcaacctttccaaggatggatgaaagatctttttacagatttttgggtaaactatgccaccatgtttttagtgattgctgtgttatatgcattcattcgtaagttttcaaaaagatggtggctgtatgcgtggctagtatctattccatttacgctatttttgacgtttattcaaccggtggttatcgatccgttatataacgatttttatccattaaagaataaagagctggagacgaaaattttacatttagcagacgaagctcatatacctgctaagcatgtatatgaagtaaacatgtctgaaaaaacgaactcccttaatgcatatgtgacgggaataggttctaattcaagaattgtgttatgggataccactcttaataaattaacggaacgtgaaattttgtttatcatggcgcatgaaatgggtcattatgtaaagaaacatatttatgtggggattgcttcagcattagttttatcgatcgtaggcttatggctaacgaaacatttagccagctttgtgattaagagatgggggaaagcattaaaaattacttctcttagtgatttaaattctttaccgcttattttacttattttttctattcttacatttgctgtgagtccgttaacaaatatgcagtcgcgtcatcatgaacttcaatctgacacgtacgctatggacctaacaggagataagcaagctgctattaaaacgtttcaggacttaacgaaatcaggactatctcaggtaaatccgccgtatttagtgaagattttccgatatggtcacccaacaatactggaaagaatttcatttgtcgagaagtatgaaagaaatgaataagtgatataagaaaaagtaaaggatatatgaagccttttatacgtaggtattaatagaaaagcctccttgcgagtaggaaaaaaattctaaaaggaggtttcattttcgaaagtactgttatataataacgtatgtaaaataaaaactgttttataacaatagggaggaatagttatttgtgattgaaaagatagcagtctaaattctcagcgtatattcacctcagctaagtcttactacatgtccttcaactacttacttatttcatctacgttcttgctcatattatggcaagctgctaatttacttcatcatgaaacagacatattctaactgctgcgttttatatttttatgaatatagaattttaaatttattagggggtataaagaatgaaagacattcgtgtaaaaaaccttgaagagaactggaaaagcgatgagcgttggaaaggaattgaacgtccatattctgcagaaaaagtcattgggctaagagggtccattgatattgaacatacgcttgctagaagaggagccgaaaagttctggaacttattaaaaacagagccatacgttcatgccttaggagctttaacagggaatcaagcagtacaacaggtaaaagcagggttaaaagcaatttacttaagcggatggcaagtagctgcagatgcaaatctttcaggaaacatgtatcctgatcaaagtttatacccggcaaacagcgtgccgcatgttgtgaaacgaatcaatcaagcgctgcagcgtgccgatcaaattcagcatttagaaggagaaggggatatcgattactttgctccaattgtagcagatgcagaagcagggtttggaggacagttaaacgtatttgaactcatgaaaggaatgattgagtcgggagcatctgccgtacactttgaagatcaattatcctctgagaaaaagtgtggtcatctcggcggcaaggtattgcttccaactcaaaccgctgtgaaaaatttgattgctgctcgtttagctgctgatgtaatgggtgttccaacacttctgattgctcgtaccgatgctgatgccgctgatttaattacaagtgatgttgatcctgtagatcgccagtttattacaggtgaacgcactgctgaaggtttttatcgcacgagagccggaatcgatcaagctattgctcgtggcttagcatatgcgccatatgcggatctagtatggtgtgagacgtctgaaccaaacttggaacaagcacaaaaatttgcagatgctattcatgaaaaattcccaggtaaaatgcttgcttataactgttcaccatctttcaactggaagaaaaagttagataagaaaacgattgaaaaattccaaagagaaattgcaacaatgggctacaagttccaatttgttacgcttgctggcttccacgctttaaaccacagcatgtttgagctggcacgaggatataaaacaagaggaatggcagcttattcagagttacaagaaagagagtttgctagtgaagtaaatggatatacagctacaagacatcagcgtgaagtaggaacgggctattttgatgaagtggcacaagtagtttctggtgggacttcttctacaacagctttaaaaggttccacagaagaagagcagtttcagacgcataaataacaaaaaaacctatgagtggaatggtcggttacgtccactcataggaaagattctactaaaaaagattcttacaggtgtaagaatctttttttatgtagtaaacacgatttaacagacagctgttcttcctgagaagaaaggatctgcctgttaaacgtacatataaatcattaacatgaattaagttcttaaaatattaagtagatgtttgaagcagggattggtactgtgctgatagctcatagaaagcaatttcatcacgttgatctaatgccgtgttaatgtttgtttctaacagttctttttgacgcttaaaaagcgattcatcaattaccatttcgatataaacatccaacatactcacagtatcaattatttttttcttgcgagcgagggacttcatcatttccgtgtacgatttttcattgttcatacctcatcacctctgcaccctttttattattatatagattaaaagaagaaaaaacaactaattttctaaatttttagatttttatttttagaaatgataaagtaagagggaaacgctactttcgtttttatcgattgactatttggtttaaaaatgagtgcttgggggcgaagaaattgaatcatttaaaaaagcgtacggtaacgatagaggatttgtatgaattgaagtctgtttataatcctcagatttctccagatggaaaaagtgtagtttatacggttcgagaaacgaagaaaatagagaacgcgtatgaaacgcagctgtttatgctagatattgaaacgaaagaaactaagcaattaacgtactacaaaggaaataatcattctcccgcctggtccccggacggcaagtggattgcttttttatccgatcgcagtcaagctgttcagctatacctattagcagtggcaggaggagaagcagaagcactcacagatcttgaaaaaggcgttagtaatccggtgtggtctccttatagtgacgaaattatgttttctacaaaagtaggagaaaaagctgtaagagttgaacaaaattatgaatatcctcagccttacgaagtggagcgtctattgtacaaatccgatgccagcggttatttaaaaggtgaatatgctcaagttgctgtcgttaaacttaaaaacaaagaagtgacgtttttaacggatggaccttatcatcactctgttgggtgctggtcccctgatacaaactcaattgtattttgcagcagccgaggagagaatccggatttatcattaactatggacgtgtttattttgcatcgcgatactaaaaaagtaacatctattacaggagaaacaggatattttcatcaagtttcgtggtcaccggatgggtcatacatagcatacattggaaatgaacgtacatatggatcagcttcaatgaatgacatatacatttatcagatctctaaccaaaaaacagcttgtatcactgctggcatagacttagaagtaggagatatggtagcaggagattttcactttggaagaaccgcagcgggaattatgtggggccgtaatgaagaattttattttgtcgtaagtgaaaaggggtctgtaggcatatataaaggaaatgtgaatggaaagttagaccctgtatttatggataatgctcacgtatatgggatatctgttcttccaaattgtgaggaagctatcgtggcaatcagtacatttacacatcccggagatctttattctctaaatttaaaaacagaggaattagtgaagctgacaaacgttaatgattcatttttaaagcatgtgcagttaacggaagcagaatctttttacgcgacttctacggacggtatacatatccacagttgggtcgtaaaagcggctgctaccaatgatgtatctccaaccattttagaaattcacggaggtccgcatcttatgtatggtcatacatttatgtttgaattccaagtacttgcatcaaaagggttcaatatcctcttttctaatccaagaggcggcagaggatatggtcaagcatttacagatgcggttcgaggggattacggaggcatggattatacggatttgatggcagtgaccgacgaagcagttaagcgctactcttatattaatgaagataagcttggcgtaacaggaggaagctacggagggtttatgacaaactggattgtaggaagtacaaatcgatttaaagcagcggtaacgcaacggtctatttcaaattggacaagtttttacggcgttagtgatattggctattattttaccgaatgggaattaaaagctgatatttatgaaaatccggaaaaactttggaaccactcgccgcttcgtttagcggagaacgttaaaacaccgctgttaatcttgcatagcgaacaggattatagatgtccaattgaacaagctgaacagctttatgtggcactgaaaagaaaagacaaggaagtagaatttattcgttttccccagtctaatcatgaactttctagaagcggtaagcctaatttacgaacggcaagactaaaatatctaacaagctggtttaaacgttatttaaaacagtctcagtaaaaagtgcatggctgttcaaccaaaaatgtgtgtgcaaataaaggctgtatggcaaacgtaaaagaacaggaaaggtaaaacgctgtaaaacttttgtttggtaaaggaaagtagtacaataagtgaaaagtagcacagttgtttaaataaggagaacattcgatggattttgaaacattaaagcattatttgacattagacggcgtcctcgagttattaaaacaatatcaatcatttggaatcattccagggctgctgttgcctattttagaagcgttcatccccatcttgccgctttttgcgtttgtaatggccaatgctgctgcttttggcttatggttaggttttttaatttcatgggttggcagctgcgttggatcactgcttgtctttttgatttttagaaaatatggacaggcgaggtttttacatttcatcagccggcatgcgcaaattcgaaagattatgatttgggtagaaagacacgggttcggaccgctgtttattatgctttgtttcccttttaccccgtcttcggcaattaatgtagtagcaggactatcacgtgttagtatggctcagtttatgcttgctgtattagccggtaaaatggtgatgatatttatgatgagctttattggggccgattttgtttcatttgtgaaacagcctctaaaagcagtacttgttttagtcatcatttttgttctatggcttgttggaaaacaaattgaacgaagattaaatgaaaaatctaaagtgaaacagtatgacaaatagtttgtttatatataacaaatagtgatgaaagactgctttttaataggcagtcttttgttatacatacagccaaaaggggtattgtaaactatagaaaagccttttcttatagggatacaacagcatttttgaaaggatcttaaaatttttcttaaagaagttatttgtctgtttattcggttggcagaacaatgcatatacagagtatctgtccagtaatgaacaagttttttgtttatcaattgtgagaaatatgctaaagtaaaagaaaaaactgggaataaattagacgtctattcctagttgcacctaagtaatgaaccctttgttttctagaaatatacatgttttttctcaacatgtattatcacctcatgtatttcaaaacgttttcttaaaaattatatgaatgatttttgagcttggctactaagatgtaagtagagggatcattactagaaaagcaccgaatgatcattaagacgtgcttggcgtcgttttgaggaggggaatgcgctactaagattcaagcgacttgctgattaatcgttgttagtaagcatcttatagcgcgggtgacatgagattaaaagataaagtggcaattattacgggtgcagcaaatggattagggttcgaagcttctcgaatattcgcacaagagggtgcaaaggtcgctatggttgactacgatgcaaaaactggagaagaacgagcagctcagctaaaagaagaaggcggagatgtagcattttttcaagtgaacgtagcggatcgagacagtgtagatgcaatggtagaagaagtagtgaaacactactctaaaatagatattttaattaacaatgcaggtatcaccagagatggaatgctaaccaaattatcagttgaaaattttcaagcagtaatcaacgtaaaccttacaggcgtttttcactgtacacaagcagtggtaccgcatatgattgctcaaggtaaagggaaaattattagcacatcttcggtatctggcgtatatggaaatgttggtcaaacaaactatgcggcgacaaaggcaggcgtagtaggaatgacaaaaacatgggctaaagagcttggacgaaaagggattaatgtaaacgctgtagctcccgggtttattgagacagatatggtgaaggcgatgccagacaaaatcattgatcaaatgaaatccactattcctttacaaagattaggtcagccttctgacattggttatgcttatctgtatttagcatctgatgagtccaactatattaacggtacaacacttcatgtagatggtggaatcatgatgtaaaagtagaaaataattcgcttttctaaaacttttcagcggtcttttgactactgaaaagtttttttgttgcatccagcatttcacatatcggcaaagtggaattttgtctgcaagttcagtaaaataataaggagagagatagagagatttagatgatgatcactataaaattttgacgactgcgtcacgtgtttacgtggcgtttatccattttgtacttaaacaaatgaaaacatagagaaaaaaatgaaggggtgaaaacgtggggctacagtttttattaggacgttcaggaagcgggaaaacggaatatcttttaaatagcatgcgccaagagctgttaaatgctccgcttgggcatccacttatttatattgtacctgaacagatgacatttcagtcggagtatgcgcttgttcaaacacctgggttagaaggcatgatgcgtgctcaagtttatagttttacacgtcttgcatggcgtatcctgcaagaagtgggaggtattagccgctatcatgtggatcaaacaggtattcatatgatgcttaaaaaaattatcgaacatcaaaaagaagagcttcgactgtttgcgaattcttcagaacaagcagggtttattgaagaactagaaaaaatggttaaagaatttaaacagtacacagtagatgccccgtctctcgaagagatgaagaaaaagcttcaagcagaagatgagaaagttcttgctgataaattacatgatttacatctcatttacggagaattagaaaaacagctgatgacgaaatatgtagatggggaagattatttgaagctgctgagtgaaaaagtagcgtcttctgcctaccttactcaagcaacaatttatgtggatggatttcatcactatactcctcaagaattaaccgtattagtagagctgatgaaagtttgtagagaagtaaaaatagcggtgacttctgattattcatatcaagattttattccaaatgacttgcacttgtttcgattaacgagcgaaacgtaccaagaactaatgggccttgcggctgaaaacgggatagagattcaagagccaatcgtatttaacgaacaaaaaagacatcaaaacagtccagagcttgcctatttagaacgatattatgatgaacggccaacgccggaatttcagtcagagcccgagaacattcagcttctgccggctgttagccgaagagcagaagttgaagggattgcaagagaagtgctttcacttgtgcgcgatcgcggctatcgctatcgtgatattgccttgattgttagaaatgcagaagactaccatgacttgcttcaaaccatttttcaagattatgaaattccgtactttattgaccaaaagcgagcgatgtttcaccatccactcgttgaatttattcgctcagtcttagaagtggtaagcgggtcatggcgatatgaaaccatctttcgagcagtgaaaacagatcttttatttcctttgtcatctgatgtgcaccagcttcgcgaagagatggatgaattagaaaactatgtacttgcttacggtattcaaggatctaagtggacgagcaaggaaccatttacctacagaaaatatcgttcacttgaagacatgaaccttgggaaaacggacgaagagcttgcttttgagcaaaaaataaatgaattaaaaaatatgattgttcctcctatttattcgcttcagcaaaaattaaaacaagggaaaataggaaaagaaaaagcagaagcgctctatcgttttttaacgaatttagatattccacaaaagatagaagcgctgcgcaatcgatgtgaagaagaaggaaagcttcaggaagccagagagcacgagcaggtatggaaagcaattcttcacttatttgatcagtttgttgaaatgatgggagaagagaaagtatcgatttctttgttcgcagatctatttgagacagggcttgacagcatgcagtttgcacttgttccgcctgcactggatcaagtggttgtggcaagttttgagcgttcgcgtttatccgatatcaaagcaagctttgtgttaggtgtaaatgacggtgtgattccagctaaaccaaaaagcgatggcctgttatctgagaaggagagagagcagctgcttgaatcaggtttattacttgcgccaaccggaaaacaaaagctgtttgacgaacaatttctcatttatttagcactttccagctcttcggaaaaactttatgtttcgtatcctcttgccaatgaggaagggaagaccctgctgccttcactcgttattaatcgagtaaaagagctatttccgctcctgcaggaaaagctgttaatgacggaacctacagatttagaagaagaaaagcaagttgattatatcacaaatcctttaacgagcatcgcgcatttagccagccagctgcaaggatggaaacgccattatccgatgagttccacttggtgggatgtgtataatttttatgtggaaaatccagattggaactcatacagtgggaaagtactaagcagcttattttataaaaatgaagcaaaacggttaacaaagaaaacgagtcagcgtctgtatggaaagcatattcaagcaagcgtatcaagaatggaaaaatttgaagcctgtccatatgcgcattttgcttctcacgggctcaagcttaaagaacgaaaagttttcaaattggcggctcctgacataggcgagttatttcacgcggcgttgaaaatgatttcagacgaacttcgcggcggtcaaaaagaatggaagaacttaacgagaaaagactgtcagcagctttctacggctgcagtgcatgaacttgctccgcgcttgcaaaatgagattttattgagctcgaatcgccaccactatttaacacataagctgcagcaaattattgaacgtgcgtcgcttgtgttaagtgagcacgctaagatgagcggctttgttcctgttggattggagcttggatttggacctagtgcagagctgccttctatgcagttcacactgccaaatggccatacgatggaactcgttggacgaattgacagggtagataaagcggaaagctcaaaaggacttttactgcgtattgtcgactataaatcaagcgataaagcattaaacctagtggaagtgtactacggtttatctcttcaaattttagcttacttagacatagttgtgacgtatgctgaacagcttcttcatgataatagaggagcattgcctgctggcgttctttatttccacgttcataatccaatgatcaacagtactaaagcattacagcctgatcaaattgaagctgaaatctttaagaagtttaaaatgaaaggactgcttttaggagacgaggaagcagtaaggttaatggacgaaacgttagaatcaggacactcacaggttatatcagctggcattaaaaagacagggggcttttattccaattcttcggttgcgagcgaagaagattttacacatctccgtcagtatgtgcgaggtaaatttgtggaggcaggtacagagattacaaatgggaaaattgatatttcgccttataaactaaaagataaaacaccatgtgcgttttgtgaataccgctcaatttgtcagttcgatgaatcaatggaaaacaacgaatatcgtcagcttagtacagagagtcaaagtgttattttagataaaattcgagaggaggccaaacgagatgagtgaagatatacacgtaaaaccggccgactcccagtggacggatgatcagtggaacgccattgtttcatccggtcaagatatattagtagccgcggcggctggctcaggaaaaacagcggttttagttgaacgtattattaaaaagattacgatgggtgatgagccaatcgatgttgatagattactcgttgctacgttcacaaatgcttctgcagccgaaatgagaaatcgaattggagaagcattggaaaaagagttaaaaaagaatccatcttctttgcacttgcgcagacagcttaatttattaaaccgtgcgtcgatttctacgctccattctttttgtttagaagtcattcgaacgtattattatttgatcgatgtagaccctggttttcggattgcagatgatacggaagcggatcttctgcgtgaagaagtattagaagaattgtttgaagaacagtacagtattgaacagaacgagcgattctttgatttaattgatcgttatacaagtgacagaaatgacttagatattcagcttatggtaagaaagctgtatgactttgcaagatctaaccctgacccaaacggctggcttgaaatgatcgtgagtcaatatgatgtgacagaagaatcttctattgattcacttccgtttctatcttttcttttacaagaagtaacaacgcagctgatgggcattgagtcgattttaaaacagggcttagagttaacaaagctgccaggagggcctgctcctcgcgccgttaatgcagaggaagacctggctcaaattcatcggctgatcagcgcttctaagcattcttttgctgatttgcatgaggaaatgcagaatttgaattttactcgtttaaagccatgtaaaggagaagcatacgactcgcagcttttagatgatttcggagagcttcgcaaaaaagctaaaacaagtcttgaaaaacttcatgctgatttgttttctaggcctttgcacggctacatggctgattttgagaaaatgaaacccgttattgaaacgctaatctttttagttcagcgcttcggtgaacgatatgaaaatatgaaaaaagagaaagggttagtggacttttctgatttagaacattattgcctgcaaatcttgagtgtaaaagaagatggagtgcttaagccttcgtccattgcccaaaaatatcgtactcagtttgaagaggtgcttgttgacgaatatcaagatacaaatatggttcaagaaacactgattaaattagtgacgagagatagtgaagaacaagggaatttatttatggttggagatgtaaaacaatccatttaccgctttcgtttagcggagccatttttgtttttaacaaagtacaagcgctttacacaagatggtcgccagttcggaaaacgtatcgatttgaataaaaacttccgtagtcgttctcaagtgcttgatgctacaaacttcatttttaatcagctgatggatgaagaagtaggagaaattgcatatgacgatgatgcttctttaaaattaggagcatcgtatccaaaagtggaaggaatggaaacggagcttctgctcattgcaaaagaaaatgcagaagaaggaggggaagaagaatcggattcttctctcgtggctttttcagaagcagagcttgaaacggctcagttagaggcaagagcaatggcgcgtaaaattaaagaactcgttcaaaaccgctttcaaatatatgatcgcaagctcgatatcatgagaaatgtgacgtatcgtgactttgttattttgcttcgttccatgccttgggctgcgcagattatggatgaatttaagcaagaaggcgtgcccatttatgccgatttatcaacaggttattttgatgctactgaagtgatgattatgatgtctttattaaaagtagtagataacccacatcaagacattccgttagcttctgttcttcgctcaccggtagtagggctttcagatgaagagttagctacactgagagcagagcaaaagaaaggaacgtattacgatgcgttaaaaacgtacttagcggtttcagatgatgaagaacttcgcgataaagtaaagtatttctatgagcagttaaaagcatggagaacacaagctagacaaagctctttgtcagaactggtatggcaaatttaccgcgatacgggtttctttgaatttgttggcggacttcctggcgggaaacagcgtcaagccaatttacgtgctctttacgatcgcgctcgccagtacgaggcaacttcatttagaggtctgtttcgatttttacgctttattgaacgcatgcaggaccgagggaacgatttaggagctgctcgagcactgggagaacaagaagatgtggtgcgtttgatgacgatccacagcagtaaaggtcttgagtttcctgttgtttttgtagctggtcttgctcgtcagtttaacttaatggacttgaataaagcatatttactcgataaagaactaggttttggatctaaatatattgatccaaaactgcgtattacgtaccctactcttcttcagcagaccatgaagaaaaaaatgaaaaaagaaagcatggcagaggaaatgcgggtattatacgtagctttgacgcgtgcgaaagaaaaacttattttagttggaacagtaaaagatgcaacagaaaagctcagacaatggagctccgttatggcacatgaagattggacgcttccagctcacgtgagaagagatgcaaaatgttatttagactggattggaccttctttaattcgtcaccaaaatgttagtcatatggttgaaggagaggtccagccggctgagatgattcatcagcatgcttcaagatggaaactttcaacgttattagcaggtgatttagccgaacagcctcttgaagagcagcagcatcatgaagagcttttaaacgctcttcaaaagcatgagctagtttcagaatcgagcgattataaagacgaagtgtatagacgcttaaattggtcttatgattatcgtgtagcttccgttcatcgttcgaagcaatctgtttctgaactaaaaaggcagcagcagctgacggacgcaggtggaagcgacgatctcgttcggggatctaaagcacctcttgaaaatcgtccgctgtttcttcaagagaaatctctgacaggagctgaaagaggaacagctacacatgccgttatgcagcagcttccattaaataaagcttatacccttgaaatggttcaagactttattcaatcaatggttaccaaagaattattgacgcaagaacaagcggatgctgttgatgcaaatgatgtagcagactttttagacagtgacattgcacaaggtattcgaacggctcgcacggtttatagagagatgccttttagtttaggtgtctccgctaaagaaatctatgatcattgggagcaggaagacgaaacaattttagtgcaaggtattattgattgtttgtatgaaacggaagaaggcctcgttttacttgattttaaaaccgataacatttcagatcgttttcaaggggattttgaacgagcaaaaccatttctaattgacagataccgcattcagttagagctttacgcaaaggccattgagcggattgtaaaacaacctgtgcagcatcgctatctgtactttttagatggtggatatgctgttgaaatataaaaaaagaagaaggcgatagtcttcttctttttcaccaataaggagagagtgacatgcgtttattacatacagcggattggcatttggggcgaacgttagaaggtcgaagccgcctggctgagcaagcacagtttttagatgaactggcagacattgtggaagaagaaaagatagatgctattcttatggcgggagatgcctttgatacggttaaccctccagcagcggcagagcagcttttttacgaaagtatgtctaggttgagcaacaatggaaaacgtccgattattgttattgcaggtaatcatgataacccagatcggctgtcggcggcttctccattagctgttcatcaaaatattacgcttcttggtttgcctactaccgatgtagagagcatttacattcctacatcagatgaaatgttaaaggttgcggctcttccttacccatctgaatcaaggttaaaggaactgttagcagaagaaaatgatgagctggctcttcgaaactcatatgatgccagagtaaaaggtattttcgacaaaatgagtgagcagttcaccacagatagcgttaatattgccatgagtcatatttacgtagcaggcggaagttcaacggactcagaacgtccaattgaagtaggaggagcttatacggtggcggcaactagtttacctgctaatgctcaatatgtagcattaggacatttgcatcgcccgcaaatgatcaatcgcgccagcacctttgcaagatattccggttcacctcttgcctatagtttttcagagtcaggctatgcaaagtccgttaccattttagatgctaagccaggaaaagagatcgagatgactgaaattccattatccagcggaaagcctttgacacgttggaaagcgaaaaacggattgtcagaagtatatacgtggcttgatgagcaaaaagatacgcaggcatgggttgatttagaagttcacgtagaagatgcactttcactagaagaaatccatcgccttcgcaagcttcatccaggctttattcatatccgtccggtattcaaagcagaagaactagcgcttgaaacaagttcacagcgcgaagtgccgatcgaagaactgtttacaaagttctacagcaggcaaaccggcggaggggcacctgatactgaattagtcaaactgtttttaaccttgattaacgatgaagaagtatcggaaaaggaggatgaaaaatgaaacctattaacttgaccgtttcggggcttcacagttttagagaaaaacaaactgtcgattttgaagcgctgtgttcaggcggtgtgtttggaatatttggtcctacaggaagcgggaaatcctccattttggatgccattacactagctttatatggaaaagtagagcgtgcagccaataatacacaaggaattttaaatcacggggaaaatgaactgaaagtatcgtttacgttcgagctggaaaacgctagtcataaaaaacgctatactgttgaacgaagctttaaacggactgatgagcttcgtgtaaaatcagcttcaagtcgattgattgaaatcgaagatgaaacgtacgtattagcagataaaacaaatgatgtaaaccagcaggtacaggagcttcttggtttaacaattgatgattttacaagagctgttgtattaccgcaaggaaaatttgcggagtttttatcgttaaaaggaacggagcgtcgtcaaatgcttcagcgtctttttaatctcgagcagtacggagatcagcttagtaagaaaatacgctatcaagttcagcagctaaagacagacctagataaaatcacggcagaacaaacgggattaggtgaggcttcaacagagaaagtaacggaagcggagcagcttgtaagtgatagcattatacttttggaaaaacgagaaaaagaagcgtctgatttgcaggaaagatacgatcagcaggcgtctctttggaaagcgcagcaggaaaaagcactgatagaagaaaaactagtacatgcttctaagcaggaagaggagattagacaaaagcaagatgtggtgacgaaagctcagcaggcagaacgtctttttccctatttagaaacatttgaacaagctgaaaagcagcagaagctttacgaagataaagtagaaaaattaaaagcacaaattgttcaaaaaagtgaggaatataagcgatcaaataatttatatgagcaggctcgcttacaaaaaaatgaacagcagcccaaattagttgttcaaaaagaacagcttcaacaagcttctgatcttcaaaaacaaattaaagaaggacagcaagaaataaaagaagcggaagtttctcttcagcaaaagcagcaggcacttcaagcgaaaaatgatgaattaatggaagcagataagcggtatcagcaaggcttgactcttcaaaaagagttaaaagaagcattaacaaaagtggaaattcaacctgattatcggcaggctgttcagcaagcattttatcgttatcaagtatggaataacgataaaaaaaatctagatgaaggtcaaaaaacgtataaagaaaaagccgaacagcttaagcatttgcacacacaaaaacaaacacaccaagagagatatcagcaaacaatagaacaaagtaaagggttatttgcagatattcaaggcttgtatcacaccgtatgtgagcgtgaaaaagagtttcagcagctttttcaacaagcagatcgtttaatgagcgatctaaaaagacgcaaagaaaaagaatggtcacgccgcctggctcatcaattagctgagcagctgacccaaggtgagccttgtccagtttgtggctctgagaatcaccctaaccccgtattacaccaacaagaagatgacatcacaactgaatcagcggatcagttcgaagatcaagttaatcaattgcgtgaacagcgatttagctattcgtcgctcaaaatgcagcttgaacagctagctaaacctcttgttgaaaaaatacctgagttagctgagtttatgaacgaagctggcgaagttcctgctttaggagaaatggatacagatgcctttgggcattatgctaagaaaatagaagttgaaatcaaatctcttgagcaggattatttgcaggtaagtgaaaaacagcaagcaattctcgggcagatacaaaaggtccagcaaagtcttgaaaagattgaattagagcttgctcattatcaaaaagaacaagctgaattagaaggaaaagtaaatcagcaaaaacaggtgctacaagcaggaaaagaagcttttcaacaagactatccttcctttgtatttaaagagatggaaaaaattaatgaaaggctgactgaaagagaaaaagaagagcagacaataaaggctcgaattgaaaaaagcagcgtattttttgaaaatcagcaaaagaaaatcgaacgtctaaaagaagagaaatatgcgggcgaaaaagaatttacagaattaaaagcaatgctgtctcataaacaatctcttgttcactcgcaaattgaacgcttgcgtacgcttacagatcaagaagatattgaacaggcgttgcaaaaaacacttcttttacttgcggagttagagacgaatgaacagcaggcatatcaacattggcagactgttcaaaaagcgtatcaaacgctgcaaatggatgaaaaagcagcgagcgaatctctagaaacagcttatatgcagtataaaaaagcagctgaaaaatgggaagaagcggtagggaattctttattcagcgaaggaaaagaagttcagcaagctttgttatcacatgatgagatgaaattgttggatgaaactgttcaggcttattgggacaatataaaacagatgaagtcatcaattgaacagttaaatattcagctgaatcaccggtccatagaagagcaccaatttgaagaaactcagcagctgcttcatgatataaaagcggctgtgaaagaagcggttcagctcaagggagcagctgagcaaacgttaaaaagcgtcaaagaacggcatgagcgatttttagtgcttgaacaggaccgtgaagaaaaacaagcgttatttgaacagtatcaaaagcttcaaacagtatttaaaggaaatgctttcgtggaatatattgctgaagaacagctgatgtccgttagccgagatgcttcagagcgtctgggtatattaacacgtcagcgctatgcgattgaagttgattcccaaggcggctttattatgagagatgatgcaaatggaggagtaaaacgtccggtttcaactttatctggtggagagacgtttttaacttccctggctttggccctttcattatctgcacaaattcagctaagaggagagtatccgctgcagtttttctttttagatgaaggatttggaacgcttgatggagagcttcttgataccgtggtaacagcgcttgaaaaacttcagtccaataatttatcaattggagtcatcagtcacgtgcaagaacttcgcgctcgtctgccaaaacgtttgattgttgagccgtccgagccttctggcaaaggaactagtgtaagagtagaaactttatagggaaggaaatctatatgaagaaaaaagacaggcggataggaacatgcgaattatgcggaaggcaggatgtcttgacgaccgtacatcatttaacgccaaaggaaatgggcggagcatttgaaccaacagcaaacttatgtattccgtgtcataaacaaattcatgcgttatacacaaatgatgaattagccattcgtcttaatacgatttctttattacaagctgattctaaaattagctcttttattaaatggattcgtaaacagccttcttctaaattacctaaaactaagaaatcaaacagccgaaaatccaagtgaataaaaaaccccttatctgctttaatagcaaagataaggggtttttttaagcatttgctgctatattttgatcgaataaatctggatctaacgtatttgttcctgaaatgccgttattagtattaacaaagttacctgtatttaaagaaccagagcctgacgctgttttagcggcactttttggagaaacataaaacgtatctccaaacgttacgacaccgcctccgacgctcatgatactaacgggtccaattattgctggcatgagattcacacccttttttcatgatattaatttagtatatgagcagctttttaaaaggttcactcactgctgctagcttgtgaagaagcactacttgatgttcctgtttcagcttcctttgaaagttcatcgttgatcagttctcgaatatgcttaatgcgggcttctgcataaacattgcacgttgatccaatatgaataactgatgagaatgagcacccttttatatcaattctgttaacgcggatcaaaggtatttcattccatgtttgaacgggaataggttcgtaatcgccatgaggaataggctcattaaagatagcgtaatcatcaaagtttccttctcgaccgtagaaaaacggatactgtctccgatcagctaaagctttattaagtagatgaatttctgttgaatctccaatttggcaaaaggagctcgccgacaaggaattaatttctatataattaacagaagatgtgcgtgaaagcataggtaagctcctttatgataacgatagtggcacataaggtccgataatcaatgattcagccggcgtatcaaatgttgaggatagagagatgtaattggcatcaccaattaaaaaaagagaagaagaagatacgcctgtaatactaacgtctccaacaagcaattcgcggtttacaacgttaaagttcatgaagggggtccacctttctttaaagattcaggtaaatacgttaaaaatgcatcaattccttttttcatatcttcataaagtttaccgataatttgaggtttaatttgttcaaaatttcgttccatttcttccggctgaacttgctgtatataaaaagtaatccgctgctgcagctgctttttaatatcttctaaaataaactcgtagtacgattcatcaatcatcatcgagcgctcatcaagcacatgttgaactatagaaaatccatattgattaagctcagctaaaatcgtttcgtggatatcagagacccactgtttttctagctggcggtccaatggttttaagctaggattttgtggtccaggacctccgggttgtcccggctgctcaccttgaggcggctgcccttgtggctgagctccttgcgaaaacgttacttctggtttctcattgataatgatatcttctaaattatcaggcgtaagagggtttaatccaatatttaatgttccatctaatgaatcaatttttaactgttcaaatttatattcaattttatcaattttaataggtggctgttcacctaactcttttatttttttctgaagttcttgtacgtttttttcaagctgagcaatgcgtccttcttgctgctgaatatacgaagacatttgctgaacatactgatgtacctgctgaatatagtccatgttatccaccttcaatcaccttgattcccttatcttctgataaagaaaatagttatatatatacatatggcgatgaaggttgtaacatgtcagtcgttgtctcgaactgggggagttaacgactgtgagaaaggagctggggcagtgcccgcgccggttccgggaataaaggtagaaggggaaacagatccaagaatgcctttttttgtttcagtaggtgcagcgcctgtaaaccctcctgtattaaagagatttgagtttggtttaataacaccgacacttccaatttgaagtaccgaagagttacttacagcactgattttcatactttgaatacagatactttgattcacataaaagttcataagcatcctcctgtatgagcttcatttctattatagatttccagcgacattttgatcatttacgtcattgtctgacgtattggttgagctctgctgattcacaacatataatccgtcacctgtattaaacgaacctgcgccagcaaatgttttagcagtggaaataggggctattgtataaacatctccaatatgaaagacgctggctgaaccaacactgttaagattaacaacaccaacaatggcaggcataggcaaacacccttttaatttagtctagtaacagcatatgaagcctagacaaaaaggtgattaatgcttttttcttatctatatgccgagagtaagcaaaacattaaagagaggaatggaaatagtaaacattgaagaaaaacttttgcgttcgatataatgtgaaagcaataatgaaataatgtaaggtgtgaaagaatgaaacgtttcaaaatgaacgcagctgataaagaacagcgcattgaggcagcagatgtattaaaaggaatcgcgcttattggtattttgctcatgaacatgccgaatttttattcacctgcttcctattacgaccataatttgttggacggttcaagaatgaattatgttgctaatggattggttgatgtagttgtagggcagacaggctacgcgctgctcgctattttgtttggatttggttttatgaaaatgttccagcgtacatacgaaaggcaagtaagctttactcctttttatgtacgaagaatcacggctttgcttcttgttggtgctattcatgctttatttatttggcacggtgatatgattgtgatgtacagcttcttcgctttgatgatgctattttttcaagaagcaaagaaagaagtgttattagcgtggggaatcggaatatttagcatttatgctgtgattatgattgttattttaacagcagcggcttttgttaacgaaggagagacagcagcgggaattcaccagcctattattgaccaggcgcttcaagcatatggacacggaagtcttgtgtcaatctttcatcagcgcttgcttgattggtactacgcgtataatttaaatacggttccttttctgtttttatcgctatttccactgtttttattaggcggttttatggcaaaaagcgagtggttcgaagaaatagaagaatatatagtggagacaaagtggctttgtcttatttcattcatcgtgtatgcagcatcatctgtattgccgtatgttttagatcacaatgtagcgacatcgtatattcacgatacaatcggaggaacggcaggagcaatttttattgtaacgttggtcacattagctatgcgaagtgtatctattcaaaaagtcatgcagccatttgcccttttggggagaatgattttaactaattatattgtccagtccattgtatgcacatttcttttttactcatatgggttaggatactacggacatatttcaattgtagaaggcttggctattgcggggattatcatttttattcaactgctgggaagccggatatggatgagcctattttcagatggaccccttgaaaaactcattcggtatgctacttatggacgcagccgctaaaaatccttttccttccttatattattggtgaaggaaaggttttcatgatatgatattttcagaaaggacgtgagatgaatggctccactacatattcatgtaacgctttggacattattaattatctcgtttgtggtttcgttgattttacatcgagcaggtaaagctaaaggtcaaaaaatcctacatatggtggcgagactcctatacttattagtattagtatcaggtctgcatatgttagcggcttggtaccattttcaaggcgcagcgctcattaaaggaattgccggagtgttagtgcttgtgggaatggaaatggtacttgttcgtactgaaaaaagaaagcgtacaggcgttgcttggggagtacttgtaattgcgcttatcttagtattctattacggatatgtcgtactaggataagaaaaaagctatcttggataagatagcttttttcttttgctttaatctaaaaaaagattcattgaacgttctccatcattaacggtatattcaaatcgatctaggtgatgtgtgcctcgttcgaataaatgctgaacggcacaaattttttcctcattgtcataaatgataaaattagcaccttttgtatcaccgtctgtcggtaaaaaacataatgtgttgtgacagtaaatacaatcataaagagagaattttaatgaatttaagtgctgagtgaatgataaaaaggtctctttcggtagtgattgaagaagctgttcgtatgcataaggtagctttttagtcagtcttagcttatccccatttcgcaataaatacgttccatcgtgaagctttatttgacggtcatcaaccataatggctttttcccagcgtgtatcaataagaagttctaaggtatcatccattacttcatggagcatggaagcttcgtcactttcatcttcaaagaaaatccactgtgaatcaacacattcaaccgtaccaatcacgaaggaacgcggctgattgttcagagcttgttgtttagaataatgattcataatcaaacctccgtgtgaaatttatccatatttttttattgcctaaaaaagctctctttataactcgaaagtgaaaataaaatataaggacaattcaactgtaactattgcgtgcatacaatggcattatttcattcataaacaagagcgtgaaagaaaggatgataaacgatgtgtggtataacgggttgggtcgacttaaagcgatcgcttttaaatgaaacagcaacaataacaaaaatggctgacactttatcgaaaagaggtcctgatgacaccaacgtatggacacagcagcatgttgcttttgggcacaaacgcttagttgtagtagatcctcaaggcggaagacagcccatgacaagagaaaaaaatgaacagctctatacgctttgctataatggagagctttacaacacggaagatattcggaaagaattactaaaaagaggttatcaatttcagggacattcagatacggaagtacttttaacatcttatatagaatggaaagaatcatgcgtagatcattttaacggtatctttgctttttcaatctgggatgaagccaatgaaaagttatttatagcacgcgacagaatgggagtgaagcccttattctatcgatcttatgaaggtggaattcaatttgcatcggaattaaaagcgatattagctcatcctgaggtgaaagcggaagtaggattagatggattagcagaagtgtttggcttaggaccttctcgttctcccggccacggcgtatttaaagaaataaatgaattacgcccggctcacgcgctcacgcttactcgtaacgggttgaaaatttggcgatactggaacgtgaaaagtgagcagcatacagatgatttaggtgaaactacagaaaaagttaaatttttagtgcaagacgcgattgtaagacagctagtgtcggatgtcccggtttgtacatttttatcaggtggagtagattcaagtgccattacagcaattgctgcaaatgcgttcaaagaaagcggcaagggctctcttcatacgtattctatcgattatgaagataatgataaattttttaaagcaaatgagtttcagccaaattctgatggaacttatatcaagctcatgtcggatacgtttcaaacaaatcatcaccgctgcattatttcaacggaggaccttgtgcagcatttaacagaggctgtagaggtgagagaccttcctggaatggctgatgtagattcatcgctgctttggttttgccgtgaaatcaaacaagattttgttgtgagcttatcaggagaatgtgcggatgaaatttttggaggatatccgtggtttcaccgaaaacatgatttgtcttcggataccttcccgtggatgcgttcattagacgctcgaattgatttgctgcaaagttcatggagaaagaaattacagttagaagattatgtgcgtgcaagatatgaagaaacattaaaggaagtgcctgaattagaaggtgaatcgttagaagatgcgcagcggagaaagctgttttatttaaatcagatttggtttatgacaactttattagatcgtaaagatcgtatgagcatgggcgcgagcttagaagtacgcgtaccttttgcagatcatcgtcttgtggaatatgcatggaatattccgtgggagatgaaaatgacgggcaataaagagaaggggattttacgaaaagcgcttgaaggaattttgcctcatgacgttctttatcgcaagaaaagcccttatcctaaaacgcataacccagcttatacaaaagctgtaactgtatggcttcaatctcttttacaagataaacagtcacctcttcatgaattttttgataagcaacagttaaagcatattattgatacaggcggagaaggatttaaagcaccgtggtttggtcaattaatgacaggacctcagctgctagctcatctagctcaaattcacgtctggtttaatcacaataatattcaaattgtggaatgacaggaccctctcagtacagagggttttttttatgaaataaagtcatctgtttctcttttttgtacgtttaactagagaagaagaccgcagtctatttttgtataactttacatagatataaaataaaagcttgaaagcaccgaataaagggaaagtgtactgaaactctggaaaaatggtacaaatgtcatattttaatggtttagttattggtaattttatgattcgaataaagacaagcagtttatcgttgtgtttaataataaagatttgtataatgtttgtataactattgtatagggttaggagtgtatgtatgcaaaaaaacgtaatcgtgattggagcaggtccaggaggactagcggcagcgatgctgttagcaagtcatggctataaagtagatgtatatgaaaagcaaggatacgtgggcgggcgaaattcagcgattaaaatgtcgggttatacgtttgatatgggtcctacatttttgagcatgccacagatttttgaagaattatttcaagctgctaatcgcaatgcgcatgattatatggacttaaagcgtctaaatctcatgtatgagcttattttcgatgatgcgcagattcagatgacggataaccataaaaagatgaaagaagaaatcgaacgtttatacccaggaaacggagaaggctatgagcgctttatgaaagacaccgaagcaaagatggcggctttgctgcctttattgcagggcgagatggatcgttttcatcactatttaaagcctgaagcaattcgagcactgccgcatttatccttaggtaaaacgctctatgatgtacttggcaagtatttcactgatgagaaattgaaattagcttttacttttcaatcgaagtacttgggaatgtccccttgggaatgtccaggagccttttctattttatcgtttatggaacacgcttacggtatcttccatccaataggaggagtaaaccaactatctcaagcaatggcaaaagtagtggaagaacatcaagggcacatccacttaaaccaaggggtccaaaaactatggattgaaaataagagagtaaaaggaattattctagaaaatggagagcgaataggggcagacgacgtcattatcaatggagattttgctcatgccatgacgaatttaatagatgaaggtacccttaaaaaatatgcagttaaaaaacttgaaaagaaaaaatactcttgttctactttcatgatttatctaggcatagacaaacagtacaaagacctgcctcatcacacgattgtgttcgctgaagattataaaaaaaatgtagaagagatcacaaaaacgctagctctttcagaggacccttctatctacatccaaaacccaggtgtaacagacccaactttagcaccggaaggaaagtctgctctttatattttagcgccggttccaaataatttcagcggtgtaaactgggatgaaaaacaaaaagattttcgggatgcagtattaaaaattgtagaaaagaaaacgggtttcaaggatttagagagtcatattgaagttgaaaaaatcatttcaccaaagcagtgggaagaagacgtgctggtctataaaggagcgacatttaaccttggacatcagctcactcaaatgatggtgctgcgtccgcataataaatttgaagaattagaaaactgctggctagttggaggaggaactcatccaggaagcggtctaccaactattctggaatcatctcgcattacgacaaagctcatcttaaaaagagacggacaattactgaatgagccgtttaaaaccatgaaggaaatggagagtgcattatgagaacagcaattgttggaggcggcataggcggtttgattaccgctttgttattaagcaaacgaggattttctgttgatattttcgaaaaagaaaacaagcttggcggccggttggcgtttgtagaaaaagacggttataaaattgatgaaggtcccacgattgtcttactgcctttaatgcttgaacgtattttagatgaagcaggcatttccgcttctcaatatgaactaatacgctgtgatccactttatgatattcattttccagacggtacgacctatacaaaaaaagcgattgaaaaagatcagttagaggaaattagccgtttgttcccaggcgaacagcaaaactaccggcgttttatgactgaattaaaaaagcgatttgaattaggaagtaaggcatttttggaaaaaacatttgtaaataaacgagatttttggacatggcaaaacatcaaggcattaaaaaaaatggatgcaaataaatcaatgagaaaatttgtttcaacgtatttccgtgatgaacgtctagtagatgcctattccctgcaatctctctatattggaggaaatccttattcggcgccagctatttattcccttgttccttacagtgagcatgctcatggcatctattacgtaaaaggcggatacgcaagtcttgtgccacttcttgaaaaggcgctgatagagcaaggtgtaaacattcatttgaataaagcggttcaagagctttctatatcaggagacaaaacggaaggggttattgttgacgaaaaactttattcatttgatcaagttgttttaaatggcgactttcctaatatggcgaaaattgctcgaaaaaaagaaaagaagtatgtgccttcgtccagctgtttactgctttatcttggtttgaagagaaaatatgatcatcacaatgtacatcaatactttatgggcaatgatttagctaaacatatggaagcagtgtttaagcataaaacgattcctgaagatcccgctatttatacatttaatccctctgttattgatccatcgttagcccctgaagggaaaagtgtgctatatgcacttataccggttccatcaggtggccacattgattggagcaatcagcaagattttgttgatggaatcattcgaactttagaagaaaaagggtttgatgagcttcgtaaaaaaatagagtgggtaaaagtacgcacgccaaatgatgctcaagaatttggactttacgaaggaggaagctttggtattgctcctgagctatttcaatcaggcgtattcagaccccagtaccagccgtacgaatataaaaatgtttttgcggtcggagcatctattcatccaggcggaggcgtgccaattgttatgcaaggagcaaaaatgttagctgatcatcttattgaacaatcatctgttcaaacggttgcaaagctttcttaagatcttgtaagccataaggaaatgatggtttatcctttaatagagaaaggggtcctatatgatgaacatttcgttagacaaagcgtacaatcagtgtgaagaaattattaaagaaaactcaaaaacgttttacaaagctttttccatgctgccgtcaaaacaaagaaaggcagtatgggcagtatatgcattttgccgtcaagtcgatgatattgtagatgaaggatgcaaccctgaaatagagctgcagcaattcgaatcagaatttgcccgatttaaaaatggagaactattaaacgaaagcgccatgtgggtagctctgcgcaatgtatttgaacaatatgagatgaatgttcaagcgtttgatgatatgattaccggccagagaatggatttagtaaaaaaagaatacgatacgcttgatgaagtgaaaacatactcttatcatgtagcgagtacggtagggttaatgcttttaccgattttagctccaactactcataaagaattagaagaagaagcaattgcattaggcattgcgatgcagctgaccaacattttaagagacgttggggaagacttagagcgagggcgcatttatttaccgaaagatcttatgaattcttacggatatacgcgcatgctattagagaaccggtgggtcacttctgaatttatagagatgtgggagcacctggccaaagaagcggagatgtattatataaaaggacttcagtcgattcataaatatccggtcgcttctcgtttgcctcttacaggagcggcgcatctataccgagcgattcttgataaaattcgaaaagaaaattatgacgtatttacagaaaagcactttgtcacaagtcaagtgaaaaagaaaattatgacatctatttctacggggtaacgcaaaggaattacttttcctttgcgttacttttttttgaaaagatatgaaaacgttaactattatgtaaataagaaaaaagtctcagccaagaagaaattgctggtttagattttgctgaacacggttcatccgcatacgaatttcgtgaaagtttcgtagcgacagaagatggtaaccttcatcctgaatttggtgttggattgattgatcgattaaataaagttggtaaagtatcggataaacctcatatctcgaacgtaaatgagacggtatagcagtatatagatggaaaaaagtgattaaaagtaaaaacttttaatcactttttttgtttttatcaacttatttaacaataatgtaagcgttaacgttataatggaaacaaaagtgagtttgaaacagttcgtctataggaggggaatagatgaaatggaaaaggacaagtatgctgcttatactattattgctttttggaagcagtgcctcagcgcaagatcataaagatatacgtgatgaggtaatatactcattgatgatcaaccgtttttataacggaagtgaacagaatgatcgaaatgttaactatgaacgttcagatgcctattatggaggcgatttacagggaatagcacaaaagttaggctatattcaagagatgggatttaccgctgttttattaactccttttatagaaaatgatgagacaggctatcatggatatgcggtgaccgaccattataaaatagacgatcattttggaacgttaaaagacttacaaaatcttgtgaagaaagcacatgagcgcaatataaaaattatggttgaatttcctttgacaatcagtaacaatcatccctgggtagcagataaagaaaaacaaacatggataagtaatgaatccggtacagataacgaagtaattaaagcattgcctcaccttaatttaaaagaaagcgctgtgcagaaataccttattaaaaatgctgcttggtggagcaaacaagcagatattgacggatattacgttaaagatatcgatcaagctccttctgcatttatttcatccttttctaagacgctaaaaagcatggatccttcttttctattaataggagaaataaacgggcaaccattaaaaaaaaatgagcaggctgattcattaggagtagatttgcttgtagatagaacgctagccgaagccactgctgctacgtttagcggtactagtcttccgcaaaaaatgttgtatgacaagtggggaaaagaaagtaatcagcctttagccaattttttagatgatgttcatagcacacgttttacagcacaagcattaaagagtgaaaatcatcctggagcccgaacaaagcaagggctttcctatctttatacttcgccgagtgtaccaatcgttttttatggaacggaaattgcgctgaatgggggaaagggagcagaaaattatggcatgatgaattttttagctaatcccgatattatagatcatttaaaaaaactgtctgaacttagagcaaagtcgccttctcttcgaaaaggaagctttacccttgtgtctgagcaaaaaggtgtggctgtatacaagagaaggtataaggacgaaacgacgtttgttgtgattaataatacaaaggaaacgtcggccattaatgttccgcttaaaaaagttggaaaagaaaatgaactaagagggttaataacggaaggaattatacgacccgttgacgatgtatacaacatttcattggagcctgagaccacaaatgtatataaagtagtgaaaaagtcagggtttaatattggatatatcgcagcggttgctgctgtttatacgggatttggcatctttttgtacaaagcatcttcaaaaagaagaaaagaaaagaaaatttctcaatctcgtaaaaaggacagcgcgtcgtagttgtcaaattatattggataagtattaatgaagaaaacataattaagaggtggaattatgggtgtaacaataaaagatgtggcaaatttagcaaatgtagccccttcgacggtatctcgcgtcattgcagacagctcaagaattagtgaaaaaacaaaacagcgcgtgcgatcggctatgaaagaacttggttatcacccaaatattattgcgcgaagtctagcaaatcaaacgacagaggcagtcggcctagtgatgccgagctcagcagacaaggtgtttcagaatccattctttcccgaagtgctaagaggaatcagcaccggagctcacgaaaacaaaagagcgatttatatgtccactggagaaacggaagaagagatttttgcagaagttgttcaaatggtacagggaagacgagtggatggattaattttgctgtactccaaagttgatgatcaagtactttcttatttgcaagaacagagcgtgccgtttgtagttattggaaagccgtttaaacatagtgaaagcatcacgtttgttgataatgataattttaaagctggaaaagaagcgacggaatatttaattgaatctggacatgaacgtattgctttcattggcggaagtcttgaattagtcgttaccattgaccgtttaacaggctatgataaagcgattcaaaaagcaaacattccttaccgggacgagtatgtaattcatgaagaatttctacagaagggaggaaaagaagctgtttgcgaacttttatctctaaaagaacgtccaacggctttggtagtagcagacgatctaatggcattaggcgttttaaatacattggatgaaatggggatttcggttcctgaagacatttcgattgtcagttttaataatgttctgatcgccgaaatggctagacctgctctcacatctattgatattaatatttttgaacttggttatcaggctgtacgctgcttgattaagcagattgaaacgccatatgctgttgcagaacaagtgcgcgttcctcacaaaatgattaaaaggcaatcctgtaaaaccattcaaatgacgaagagataactttataaacgaatagaaagaggctggaacaaaagtattgtagttgaaggaagatccgaacgagtttgattcttgatggagaatcaaactcgttcggattttttcgtttgtagggtaaacgtaggtagctgcttcttagctgttgatttaggtatgtcttaatatattcttatgcaaaatatattggcgtttgaagtgcaaaaaaaataaacacctgcaaattatttttccctttatcaaaaagaaagaatgatacaagtggtgaaaaccttgatgacaaataggccgtaaagttttattaaaagttggcacgctatttgcataactataaagtaaacaaagatttgcatactaggaggtatatatcatggtagtttcttattctcatgaaccatttacaaattttaaggacgaaaacaataaaaaggaatttcaagaagcattaacatatgtaaatacacagcttggcaaaacatacccgcttgtgatcgacggtgaaaaagtggaaactgaagagaaaattacgtctgttaacccagcgaatataaaagaagtgattggatatgtctctacagtaaataaagatctagcagagcaagcgatgcagtcagctttaaaagcttttgaaacgtggaaaaaatggaaagtagaacatcgcgcggatattcttttccgtgcagcggccatcatccgtcgcagaaagcatgaattttctagttatcttgtaaaagaagcaggaaagccttggaacgaagcagatgctgatacagcagaagcaattgattttttagagtactatgcacgtcaagtcctgacgttaaaagatggttctccagtacagagtcgagacggtgagtataatcagtacaattatattccgcttggcgtaggtattattatttcaccatttaacttcccgttagctatcatggctggaacagcagtagcagctatcgtaacaggcaacacgattttattaaagccagctgatgccactcctgtagtagcagcgaaatttgtagaagtaatggaagaagcaggtttaccgaaaggcgtattaaactttattcctggtgctacacctgaaatcggtgactacttagttgaacatccaaaaacacgttttgtttcgtttaccggctcgcgcgcagtaggttgccgcatttacgaaagagcagcaaaagtacagccgggccaaaaatggctaaaacgcgttattgctgaaatgggcggaaaagatacggtggttgtagacaaagatgcggatctggatttagctgcttcttcaattgtatattctgcatttggttttgcagggcaaaagtgctccgctggttctcgtgctgttgtgcatcaagatgtgtatgatgaagtgcttgaaaaagcagttgcgctaacaaaaacattaaccgttggaaacccggaagaagtttcaacttatatgggacctgttattcatgaggcgtcgtataacaaagtattatcgtatattgaaattggaaaagaagaaggacggcttgttgcgggaggagaagcagacaattcaactggatactttattcagccaactatttttgcggatgtagatgaaaaagctcgtctcatgcaagaagaaatttttggtccggtagtagcattctctaaagcgcgagattttgatcatatgatggagattgcaaacaatacagaatatgcattaacaggcgctttattatcaaacaaccgcgagcatattgagcgcgctcgtgaagagttccatgttggaaatctgtattttaacagaggatgtacaggagcgattgttggttaccagccttttggcggatttaatatgtcaggaacggattcaaaagcaggcggaccggattatcttgttcttcacatgcaagcaaaaacaacatctgaaacattctaattagaaaataaggaggagtaaatatgacaactgaaacacaaaaaacggtgaaaatcattgagcaaacagaaaaatttggggcacacaactatcatccgctgccgattgtaattgaaaaggcagaaggcgtatgggtacacgatccagaaaataataaatatatggatatgctaagtgcttattccgctgttaaccaaggacatcgtcatccaaaaattattgaagcattaaaacgtcaagctgataaagtaacgttaacgtcacgagcgtttcataatgatcagcttggtccatggtatgaaaagatttgtaaattaacaaataaaaatatggctcttccaatgaatacgggagcagaagcggtggaaacagccattaaagctgcacgccgctgggcttacgatgtgaaaggcgttgttgaaaatcaagcacaaatcatcgcatgtgtgggcaacttccacggtcgtacaatgacagctgtttccttatcgtctgaagcagaatatcaacgtggttttggaccgatgcttccagggcttcaaaccattccttatggtgatttagaagcgttaaaagctgctattacaccaaatacagccgcatttttaattgagccaattcaaggtgaagcaggtatcgttttacctccagaaggcttcttaaaagctgcagctgatttatgtaaagaacataatgtgctctttattgctgatgaaatccaagttggcttagcgcgtacaggcaaaatgtttgcttgtgattgggaaggtgtagaaccagatatgctgattttaggtaaagcgcttgggggaggagttttccctatttcttgcgtagttgctaatgaagacattttaaatgtctttaaccctggctctcatggttcaacatttggaggaaacccgcttgcttgtgccgtatcattagctgctttggaagtaattgaagatgaagaacttccagcgcgttcattagaattaggttcttatttcaagcagaagctccaaagcttaagcaatccagttattaaagaagtgcgcggccgaggtctattcattggggtagaattacacgaagaagctcgtccttattgtgaaaaattaaaagaccaaggtttgctttgtaaagaaacgcacagtacggttattcgttttgctccgccgctaacgatttcaaaagaagagttagactgggcaattgaacgaattgaaaaagtatttgctgagtaatcggtttaaaataaataaaaatagtacgatatgtatatatcgtactatttttattcatatgcagctaaatgacgtttttatttgataggcaggaggaatagaagtgtatatccaactctcacagctaagcatggaagagcaagttgaatgtttaacaaaaacgttagtgaaaatcaaaagtatcaatgggacaagcggcgaagtaaagattgctgatttcattaaaaacacgcttcaaagttttccttatttcaaagaaaatcccctccacgtttgggaacagaaaattaatggcgatacgctaggtagaaaaaatgtatttgcttttattcaaggcagcaaaaaaaatgctcaaacaatgatttatcacgctcacttagatacggttggcattgaagattttggtccattaaaagacatagcattagatccagaagaacttcagcgctatttctctacgcataacattaatgaagatgtacagcgagatgctcgctcaggtgaatggatgtttggaagaggagccgttgatatgcaaagtggaattgctgtacatttagccaatgtgctgcattttactaagcatccaaataaattagaaggaaacgtcctttttatggtcaacccagatgaggaaagtcagcatgctggaattatttctgccgtttctgaactgaaccgtttgaaaaaagaaaaaaatctttcatatgtagcagcgattaataccgactttattacacctctttacgatggagattccacgcgctatatttatacaggagctgctgggaaactgcttccatgtttttatatttacggaagggaggtacacgtaggagatacgcttgctggtatagatcctaatttgattgcatctgagatcacaggaagcatccataacaatattaatctaactgaaaatattgaaggagagctggtactgccaccttcctgtctgtatcaacgagataataaagaggcttataatgtgcaaactgctgtaagcagtcatttgtattttaactatttcatctatgaacgaacggcaaaagaagtgatgagtcaattaattggattatcaatcgaagcatgtgaaaaagtggagaaaaaactttctgattattacgaactttttgttcagagaacgaatttaccaaagcgaaacttgtcttggaaagtggatgttgtgagtttggaagattacctggaagaattggatcaaaaagggataaatgctcaggcttgtattgaacgagctttcgaacagtatgcgtatttagaacttagaacaaggtgctttaaagtaattgaagaacttcaaaagttagatccgcatcaaagtccgcgcgtaattgtcttttttgcaccgccttacttgcctcataatcacttgaagaaagacgaaagtagagatcagcagcttctttatcccttgcaagcagctgtggagaaggttggaaaacagacgggagagacgtttcagtttaaaaaattttttccctacctagcggatggcagctttttatctcttcatgagacagatgaggaaatcgatgcttttacacgtaactttccggggtgggggattgcaggggcgattcctttccgtgaaattcgagagttaaatattccgtccatcaatataggagtatatgggaaagacggacataagtggacagagcgagtgtataagccttattcgttcggagttcttcctaagttgattcaagaaacaaccgttcagatgctaaaaagtaggcatgcttgtacaaaccacatataagaaaatgaagaacggaggtaccgatgaatagacatacagaacaaaaccaattacagagaacaatgaaaagcagacatttatttatgattgcgttaggaggcgtaattggaacaggcctatttttaggttcgggttttactattagccaggcagggccgggaggagccattcttgcatatataataggcggcttcctcatgtacttagttatgctttgtttaggagagctagcggtagcaatgccggtttcaggttcctttcaagaatacgctacaaggtttttaggaccttctacaggctttatgattggatggctgtactggttcagctgggcaaatacgacggggcttgaatttacgtcagcaggaattttaatgcagaggtggtttcctgatgtacctatatggtcatggtgcttgatttttggtgtcattacatttttaattaacgctctttctgctcgaagctatgctgaaactgagttttggttttcgagtattaaagttacggctattattctatttattttaattggaggagctgctgtttttggttttatcgatttcaagggaggagaacccgccccgtttctttcacatttcacccaaggcgcaggtctttttccaaatggaatactggcagttttattgactttagtaacggttaacttttcgtttcaaggaacggagcttgtcggcattgcagcaggagaaagtgaaagtcctgagaaaacgttgccgagatctattcgaaacgtcatttggagaacgctgtttttctttgtattagctatgtttgttttagtctctattctgccatacaaaacagcaggcgtcattgaaagtccgtttgttgccgtattagatcaaattggcattccatacgcagcggatatcatgaactttgtcattttaacagccgttctatcagtggcgaactccggcgtttatgctgcttctcgtatgctttggtcactgtcaaacagcaatatggggccaaaacctttgaagaaattatctacaaaaggtgttccaattaacgcattaattgtgacaatgattatttcagggtgctcgttgattacaagtgtcgtggctgctgaaaccgtatatctttggtttatttcgatttcaggaatggtaaccattattgtttggatgtccatttgtgcctctcaatttatgttccgccgtcgttttttagcggaaggaggagacataaaggaattgaaatttaaaacgccactttatccattcgttcctattctaggtttttgtttgtatggacttgtattaatcagcttaatttttattccggatcaacgaattggtctttactgtggtgtccctttaatcattgtactctacgtgtattatcacgtaggaatcaagaaaaatattgatcaaaaacaatcggattcaccggtttataaagcaaaataaaaaagaagtgcactgtgcacttcttttttatttagagcggatgtttaatcgtttcatacgatattgcaagctttgtctggtcagccctagtattttagcactttttgagatgttgtggctgtgttgttcaagcgtttgtttaatacattctgcttcgaacgctaacagctgttcctttaaaggaagagaaggctgaaaagcgcttggataagaaggtgcgtcactgcttgctttattttcaaaatgttcatgctgctttagctggaacttcgttctgtattggaaaggaaggtgagaatagtgaataacatcttcgtccattactaagttcattgcaccttcaataatgtgttctaattcccgtacgttccctggccagtcataagagagaaaagaagacataacttggtgatctacggtttttacattcatctgaaataaatcattgtattttttgatgaaaaactttgttaattcaataatatcttcttttcgttcacgaagaggaggaataaaaagcgtcacgacgccaagtcgataatataagtctttgcgtaatcggttttctgcaattgcatcgattggatcttcattcatgttcgcgatcactcgaacgttaaccggtttgtccactgtatccccaattcttcgtacggttttttcctgcagcactcgaagaagcttagcctgaagatttgggtttaacgagttgatttcatctagcagtaatgtgcctccttgcgcttgttcgaaaagaccaggattatccattgcacctgtaaaagctccgcgtttcgtaccgaacaaaaggctttcaattaaattatccggtagcgcagcacagttttgtgaaataaaaggcgcagaagagcggctgctgccattatgtatgctttgagcaaacagttcttttcccgtgcctgtttctccaataattaagacataagaaggagttctagtagcgcgcttggcgtcttcaatcacatcatgaaccgcttgactgtttccgatgatgctatcaaacgtaaagcgtgtgtttcctttttgcctaatgttttgccggattagacgctctagtttcgtcacgtcctgagcaatttcaaccgctccttgaatgaccccgtcttttaaaatagggaaggtattattaatcgtcgtgatttcttgtccttgattgttgaaatacgtttgcttgacgttaaccgtttcttttcctttttgcagcgcctgtacaagcgtgctttgctgattttctttgaacataaacacatctaacaagtttttatgtaaaacgtcttgttcatccatcagctccatctttgtcatcttttcattataaataatagtttttcctgtttcatcgaccgcgtggataccggcatcgactttatttaaaatggtttcgtatatatgtttaagagtgcttaatgtatcggtcattcaaatactctcctttagcggtgttcatatctctatttaaacaaaaatagctgaattctgatagtgtttccccataaaaataaatgaatgaccgaagagaaatgttatccgtttacaatggatcccccattaatgtgtagaacttgcccggacatataagaagaatcagagcttgccaagtatacataggccggtccgagctcagaaggctgtcctgcccgtttcataggtgtattagacccaaatgtcgcaacttgctgttcgtcgaacgtagacggaataagaggtgtccaaatgggtcccggagctacgccgtttacgcgaatgccttttgttgcgagcgaagctgataaagaacgtgtaaaagcaacgatagcacctttggttgaagagtaatcaatcagctgatcatgtccatggtaagctgtcacagacgttgtattaataatagcgcttccttgttttaaatgaggcaatgcagctttggtcagatgaaaaattgaaaaaatattcgtttgaaacgtacgagtaagctgttcagtcgtaatatccgtaatacttttttgaggatgctgttcagctgcattattgactaagatgtctatttttccgaaagtctgaatcgcctttgagacgacttcttgacaaaaatgctcatctcctatatcgccagcaagcaataaacaagaagcttccattcgttcaacttgttttttggtttcatttgcatcatcgtgttcattaaggtaggttatgacaacatttgcgccttctttagcgtaatgataagcgacagaacgtccgataccgctgtctcctccggtgataacagctactttgttctgtaattttccgcttgccttataatctggagcgatagaggtagggattgggtgcatatctttctcaatacctggctgagtttgctgatgctgaggagggaagttttgtttttgattttgattcattagtatacactccttaattaatatgagtatgtaagcgtatactagtatttgttaagaaagtgtatctatgcataggaataagtctgaacgaataaaaaaaggctttaaaagaaaaaatgaatgccgtggcatccattttttagcggtaattaataaattgtacgtcaataggtaaatcagcgctgcgaatagctgaaataatttgctgcaggtcatcacgatttttaccgcttacgcgaagctgatcatcttgaatctggctttttacttttaaaccggtatttttaataattgtatttagctttttagcgttgtctttgtcgataccttgaattagcttggcacgttgtctaaccgttcctccagaggcgttctcaatttttccatatgagatattgcgtgtaggtacgccgcgtttaataagcttggagatcagtacgtcttttaactgttcaagcttaaattcatcatcagaaataagaacaagctcttcgttttcaagtgagatttcgcttttactgcctttaaaatcgtagcgggttttaatttcttttgttgccatggtaatgccgtttgttacctctgataaatcgacttgtgacacaatgtcaaatgaactatctttagccataataacctccatatgtaaagagtttgttcttttattataaataaaacacaaactgtatacaactgatattgaatagagagccggtaattgatacaatacaagttatgctttttgttgtaagctatagaagcagcttttttaaacaatgcatgcatttaagttgatttgaaatttaaaatgctgttcgatgcaaagggagaaggtatgtggtgacggaatagtcactactaatttatataaaggatggatagaacgatgaatgtagaagctgggatgaaagcgtatttaacagtaaaccgggaaacgccgattggttatatgttagcagaaggtgaagaagaaattttgctacataaaaatgaaacaacaagagaacttgctgaaggagaagaagtagaagtttttctataccttgatcagcatgaccgtttaacggcaacgatgcacttacctcttgttgaagaaggtgtttatgagtgggtcgaggtcgtagatgttaatccaggtttgggcgtgtttgtaaatatcggcatgaacaaagatatgttaattggttcaacagacttacctgcgctagaagatctgtggccagaagtcggaaacaaggtttactgtacaatgaagatttcaaagcgcggtaagatgtacggaaaaattgctacagatgatgtgatgaaagcaatggcattagatgctccgcccgaactttttaatcgtgaagtgagcggatacatctatcgcgtactgcgcgtaggttcatttattatgacagatgaaggatatgttggatttattcatgaaagcgagagacgcaaagaaccaaagcttggtacatatgtaacaggccgcgtaattaatgtaaaagaagacggaacgctaaacgtatcgcttcttccgcgcaagcaagaaagcatggatgaagatgcacaagtactatacgattacatggaaagccgcggtggcgttatgccattttgggataaaagctatccggaagatattcgtgagcgctttaatatgagtaaagctgcgttcaaacgtgcgcttggtaaactgatgaaagaaggaaaagtttatcaagaagaaggatggacatattttaaaaaagaagaaaactaaaaggagaagccgctgaaaattcagcggcttctttttataagtgatcagtttttttagaaaatgaatgttttccaagctcacggttatgcttagcttgcagattcttttcgtgaagctttgcgttattatcttttgcttttttatcgttatcgctcgtttttggcatcgtgatacacccctttttggtcgtacctttagaatgccctgacctctttaaattattcgatgttttcgttcaaaaagaagactgcaatcgtccctgggccagagtgagaacctatggctgcaccaataatattaatgataaaatgtttggttccaaaacgttcttgaatcatctctttcagctgaagagctgtttctaaatcatctccatggctaattccaatggtttgagaagagaggttttttcctcgctcttccattacatcaagcatgcgcttaaatacttttttacggccgcggattttttcgattggaatcaattttccatcttccacatgaagcagcggcttaatattaagcagacctcctacaaaagcagaagctttgctcacgcgtcctccttgagcaagaaaatctaagtcatcgaccgtaaaaatatgttccatatgcagcgcgtattgttttattttttctgtcatctctattagtgagaggttttgttgtagtaattgtgctgcataataagtaactactccttggccaagagatgcacatttcgtatcgattatctctaattgaaaatcgggatacttttctaggagttcttctcgaatcatcattgctgtttgatatgtaccggataattctgaagaaaaagctaaataaacgcacgaatcacctgatttagctatgtcttcaaagacttcatacatagtagttggagccgcttgagatgtttttggcatcttgcctttacggatagcttcgtagacagaagctggctcaatcgtttgtagatctaaaaattcttgattatccaggcttacgcgaagtggtaaaaagccaacgttattttcttgaaaaaaggataaaggcaaatcgcttgcactatcggttaaaagtttaattgacataaatgtcaccttcctaattgcatttataaaatattaaatgaatttgatgtataaacattgagaagcgttatatacgatatagtattagtgtataagcactttgaggaaaatacaatttttgaataagtttttttaattctgccaaatcgtacatactatatgtactaactattttaaagatgctgactttattcattttataaatgggtataggagagtaagaagttttaaaaaagcggaggtcggtcatttgaatatgtggcttgaaacaaaaaaagcgatagtcgtcttggtaggagcattattgaatgcgcttgcgctcaacttgtttttgatacctgctaatgtatattcgagcggctttacaggagtagcgcagcttgtttcgagtatcgtgacagattacaccccttttactatttccacgggagtgttgttgttgttgttaaatattcctgtaactattttagggtggaaaaaagttgggaagtcatttactgtttacagctttatcagcgttgctgcaacaactttgtttcttggaattattcctattcaagcactttctaaagacatcatccttaacgcagtttttggaggcgttattttagcggtaggggtagggattacattaaaatttggagcttcaactggtgggctcgatattattgccctgattttgtctcgagtaaaagaccgaccaattggcacttatatgttcatattaaacgcaattattatcgtgctagcaggtcttttatatggtgctgagaagtcactctatacgcttgtgacgctttatacaactactcgcgtcattgatgttattcatacgcgtcatgtcaaactcacagcaatgatcgtaacaaaaaaaggagtggagctaagaaaggcgattcacgccaaactcgtgcgagggattacggcggtaccggctaaaggcggctttacaaatgaagataaagaaatgctgatgattgttttgaccagatatgaattatatgacttggaacgagtgattaaagaggtagatcctaaagcatttaccaatatcgttcagacaacgggaatctttggtttgtttcgcaaggattaaaaaaggtccaggtattaattacctggaccttttgtattaatgtgtaccttttaagtcattagaaagttcttgaagctgagcttgttcttcaggagaagcattttgctgcgcatgagacagcatatcagctgcaatgttttcacccgaagctgcagacgtatgagcctgagacgtttgatgattttgaccagcagctcccaatgtattctgaagctgctgaagctgagcttgttcttcaggagaagcgctttgctgtgcatgagataatatatcagctgctacgctttcactggacgtgtgagctttaccgtgagcgtgagactgaccgccttctaaagtgttttgaagctgttcaagctgtgccttctcttcggaagaagcattctgaacgatatgagacagcgtatcagacgtaatgtctgcgcttttctcttgtgaatgtgattctccatctgtatcgtacgcttgatgcaatgagttttggaattgcttcagctgctcttgctcctcaggagaagcgttagaagcaatgctatttaatacaccttctgaaatatcaagttcaccgttgccgtgcttttgacggtgaagctgatcttctgaatggccggatactgcatttcgaatcgcatcttttacttgaccaaaaagtgaatttttcataagttactgtcctccatgaggagtttggcgctgctgagcttgaaatgcttctgcctctgccatagtcatatgataaggaattcgttcatcatgtttttgaactgcgtctgcaccttgtttcacaaaacgttttgatcgattgcctctgcccatcataaattcctcctcgtaatataaataaaaccgacaccttaagaagtgtcggttatagtgtgtactaaataaaaaaaatgatagcgataaaaatttaccttgcttttcaaaaaaagctaagttataaatttaacgttttttccaaataataagcaataccatcattttcattcgattttgttacttcacgcgctagctgttttaattcgctaataccattttccatggcgataccgtgtcctgcaaatttaatcatttcaaaatcattgtcttcatctccaaacgcaataattcgttcgcgtggaatttgataatgattagctacgcgctcaagacctacagctttattaagtcctttttttacaatttcaacgacatgccaaggtgctccccagcgtctatgttctagtacttctgcatgaacatctgaaaggtgagagcgtatatcttgtacatgttcttcatctgcgtgaattaaaatagacgttggatcgtgctgcagcgtatgacgcaaatcacctgtttgtaatttaggatcccctaggctaagtacatccattaattttcgatcttcaaaatgaagatacacatcatcttgtacttctgccatgatattgttgatgcgatagtcttgcatagctgtcacaatgtcatggacagtgcggcggtttaaaggttcgtgatgcgtgccgaaatcaggctgaagggggtgatggacaagcgctccgttaaagtttacgataggcgtggataaatctaattcgctgtaatacatagcactggaacgataaggtcttccagttgcaatcattacaatatgtccttcttgtttggctttttctaatacccgtttcgttgtaggtgaaatggttttttcattcgttaacaatgttccatccagatctaaggcgattaagtgttgatcgtttctcatatagggctccttttaaattgaagtagttatacgattatattgaattctactaatattcatgcttgtattcccatattttacacaacttttccttaggagcaaagcagaacgattgacatgcaaaagctgtcttgttacggtgtaagacatagttattgattgcttacgataaattgtttaagggtatatttaatacgtgaagataattacggaagtaaaagaaaggagaatgaatatggataaacagttagaagataaaatcatggaatcactagaagaagtaattgatccagagcttggcgttgatatcgtaaatttaggcttagtgtacggtgtagaaatggaagaaaacaacacggttatcgtgacgatgacgttaacttctatcggctgcccgctggctggtgtgattggcgaacaagtgaaaaaacaattaatttcgcttgaagaagtagaaaatgtagaagtgaatatcacatttaatccgccatgggataaagatcgcatgacgcgctacgctaaaattgcattaggtgttcaataagaaaaaagccatcaacgatggctttttttcttattcaattctgcacaattccacagggcagtcctcacagtctatttctttctttaaaaaagaaagcttatgaatgatgatttttccatctgccattgaaatcacttcgttttttcgcaactcagcgagcatgcgattgaccacttctcgagatgtcccgcatagattggcgatttcttgattggtcaacgttacgtttaataaaataccatctggcttcattactccaaagctattagacatgcggatcagagtagaatagagagcaccttttttccatttagaattaagtctctaaattttgtctgcattcgtttaatttgtagtcccatccacttcatgtactccatagaaagagcagggtattgtgctagttcgttttctaacacccgtttttgaatactgattgccgtacaaggttcaatagcttttgcttgaagcatatggggagtagatccgcaaaacagcatgacttccccgactaagtctcctgaactcgccagctgaagcgtcagctcgcgtccttccggtgtcactttacctacttgcacggcccctgatgtaataaaaaataaatgagttgaagtcgaaccttcttgaaagagaaagtcaccttttttaaacgaaattttatgatcaaagctcataaaaaattgctgcagctcattcgaaaaagaatccgttgtgatgttcatcatgttatcaccttttaattaaaatttttgcgactgctacttattaatctattaagttagaacagtctgtatatgctgtacgtccactagccgtataaaaaaatgtcatacggatgattttatcgatattcttattatacacaaaaacaaccagtgttttccaaaactatctgtgaacaatttctaaacaaaaatagaaagatagttataaaaataaaaacttatgaataaataaaaatgtttaaaaatatagaataaagtgttggattttttaaatattcatttgattttatttttatacggtattataatgataaataattcaaatagatacgtggaaaaaggagttttaaaatgaaagaatacaaggtaggaattgttggagcaacagggtatggaggagtagaactgattcgtttgttagcgaatcacccacattttcatgtttatgcagtttattcatcctctcaggatgggatggaactagcagaagtttatcctcacctttctaatactgtatatacactgcaagatataaaccctaagaagatggctgaagaattagatttagtgtttacagcaactccgtccggtgtttctagcaaacttgtacctcaattaatagaagaaggaataaaagtggtagatctatctggagattttagattaaaaacagaagcgctttatgaaaaatggtacaaaaagcctgctgcggatggaatatttttgcatcagtctgtgtatggattatcagaatggtttgcagacgaagttgaaagcagtacgttcgttgcgaatccgggttgttatccaacagctacactgcttgggttagctcccctcgttagtaaacaaatggtgaaatcaaactctattatcattgatgcaaagtccgggatctcaggagcaggacgcggtctttcgcaaatggctcattatgctgaaatcaatgaaaatatgaaaatatacaaagttaatcaccatcagcatatcccagaaatcgaatctattttagaaaagtgggatgaagaaattggccacgttacgttcagtacgcacttagttccaatgacgcgagggattatgagtacaatatacgctgaactttctgaagaaagctcagtacaagagcttcatcagctatatgtagatacatatcaaaactccccgttcgttcgcgttcgaaaagctggtgaatttccgtctactaaagaagtaagtgcatcaaattattgcgatatcggtgttgcatttgacgaacgaacaaagcgtgtcacgattgtttctgtcattgataacttagttaaaggggcagccggccaggccattcaaaatgccaatatcatgatgggatttgaacagcaagcgggtatcgggctactgcctgtcttcccataaagtcaacagcatcactaatcacgataaaagcaggagggaacgtatagtgattacggttaaacaaacgaaagaaaagataaagaaaatagagaacggtacaattgtaacgccgctaggtttttcagcagacggcgttcacgctggtttacgttatgctaaaaaagatttaggagttattgtaagcgatgtgccagctaattgcgcagctgtttacacgcttaacgccttccaagcggcgcctttagctgttacaaaagaaagtgtagcggtggagcagaagctgcaagcgatcgttgtgaacagcgcatgtgcaaatgcatgtactggagaacaaggattaaaagatgcataccaaatgcgaaatacatgtgcaaaaaagcttaatatcctacctcatcatgtagcggtagcttctacaggcgtaattggagagcttctagatatggaaaaaatcgtgaaaggcattgggttgttaagtccctcgtcgaacaaagaaaaagcagaagaatttcaaacggctattttaacaacagatacagtgatgaaatcagcttgctatgaaacaaaaattgacggcaaagtagtcaccattggcggcacagcgaaaggatcaggcatgattcacccaaatatggctacgatgcttagctttatcacaacggatgctaaggttgaagcttcagtgctacaagatgcgctaggttctattacaaataaaagctttaatcaaattacagtggatggtgatacgtccaccaacgatatggttgttgttttagcaaatggaaaagctgatcaccagtcgcttacaccagatcatcctgaatggaattcgttttatgaagcactgcgcttgacgtgtgaagatttagccaaacaaattgcacgcgacggtgaaggagcaacaaaactaattgaagtaaacgtatctggtgctcatacaaacgaagaagcaaatgtgattgctaaacaaattgtgggctcgaacctagtgaaaacggccatgtatggagccgatgctaattggggacgaattatttgttcagttggatacagcggagtagcgcttaatccagaaacagtgaatgtttcgttaggcaatatccagatgttagaaaacagtcagcctgtttcatttagtgaagaagaggcaaaggcttatttagaaaatgatacggtcgaagtctatgtggacttacagcagggaagcgggatcggcaaagcgtggggctgcgatttgacttacgattatgtcaaaatcaatgccagttatcgaacgtaaggagagagtgaaatgagcaatgaaaaaatcgtcgttgtaaaatgcggaggcagcattgtcaaccagttaacaagcgctttttttgaaagcattcagcagttaaaagcaaatggatatcagatcattgttgtgcacggaggcggacctgatattcaagatacgcttaccaaacttcacattgaaacggaatttgtagatgggcttcgaaaaacgtccaaagaagcattagaagttgtgacgatggtattagcaggcaaggttaataagcagcttgtaaaagatctacaaaaatcgaacttaaaagcggtaggactatcaggaattgatggattattgcttaaagcagaggcaattgatgtggaacgtctaggttacgttggagaagtaaaaggcgtaaacgatacattattaaaacaactaactgacagtaagtatattccagttgtttcttccattggagcagatgaagaaggtaatagctataatattaatgctgacgtggcagccggagccgttgcacaagcagtaaatgctgaaaagctgatgtttgtaacggatgtaaaaggtgtgttaaaggatggagcattgcttcctgagcttacaaagtcagagattgatgcacttattgaagaaaaagtaatttatggcggaatgattccgaaagtaacatcagcggtaaatgcgttatctcctttgcttgaagaagttcatattattagcggaactgatggatttttagataaggaaggaaagctgattggtacagcaattaaatatagtgggaaaggtggagaagatagcgatgagttcattgtttccaacatatcaacggtttgatatccatgtggaagaggcgcaaggaacaaaattaatagataacaaaggaaatgagtatttagattttatttcaggtatcgctgtttgtaacgtaggtcatcgtcatcctgatgttcaaaaagcggtcgaagagcagttaaataaagtgtggcacgtgtcaaatttatttcatcaatcgattcaagaagacgtagcaggtaagcttgtggaacgctcaaacggtgatgcagtatttttctgtaacagcggtgcagaagccaacgaagcggcgattaaattagcgcgcaagtacacacaaaaacacaaaattattacgtttacaaaatcatttcatggacgtacatttgctacaatgacagctacagggcaggcaaaaattcatgatggcttcggtcctcttgttaatgagtttgtttacgtgccctacaatgatgaagaagcattaaaacaggaaatggacgacagcgtagcagcaattatggttgaagtcattcaaggagaaggcggagtggttccaggaaccgaagcatttttattaaccattcaagagctatgtaaaaagcacgaagcactgtttatagttgacgaagtgcaaactggaatcggcagaactggaaaaccatttgcttatcagcattttaacgtttcaccagatattattacagcagctaaaggattaggaagcggaatgccggttggtgcaatgattggcaaaggctatctcaaagaagcatttggacctggtactcacggaacaacctttggaggaaacccaattgcactagcttcagccaaagcaaccttaaacattatttttaatgaagcatttttggcagaggttacagaaaaaagcctttattttaccaatgctttgaaaaatagcgtagcagattattcatttgtaaccgatgttcgtggaaaaggttttatgattggaattgaatgcggagaacatcagtcagcattgcttgcagctatgcgtgaaaaaggattgctagcactgggagcaggaccgcatgtagtacgattgctgccgcctttaactgtaacaaaagaagagttggaccaagcgattcatatcattgaagaagcgtttagccaaacaaaaattacttcataatacaaatttttttgaatatgtttgtataaaaattctgttttataaataattattcgaagagggatgcacaatgaacggatatttacacttagcaaacggcgattcgttcgccggacacattgaacatacagcaacgcaccaggcagaaggagaaattgttttctttactggaatgactggttatcaagaagttgtgactgatccatcttacaaagatcaaattatcgtctttacgtaccctttgattgggaactatggtatcaatgaaaaagattatgaaagcaaaaagcctcacgtagcaggcgttgtcgtatacgaatgttcagatgaagggttccattacgaagcgatgtacagctttaaacaatatttaaagaaatggaacattccgcttattacacatgtggatacgagagcggtcgtaaaacgaattcgaaaagaaggtacgatgcaatctgccttttcgacatctgctgaaccaccagcatttactgctgaatgcgatggatatgtagtaaaagaagtatcaacaaaagagcctgttacttacgggaacggtgaaaaacacgttgtattaatggactttggctataaaaaatcaattttacaagagctgttaaatcgaggctgcaaagtaacagttgttccttattctacaagctcttcaaaagtaaaagagctgcagccggatggcattgtcttatcaaacggacctggagatccaacccaagtgagcagtcagctggatgaactaaaagaaattatttcatcgtatccaactttgggaatttgctttggacatcagttaattgggcttgcttttggggcacaaaccaaaaagctggcgttcggtcaccgaggagctaatcagcctgtaattgatttaacgaataacaaagtgtgtatgacgtctcaaaaccatagctatgtcgtagatgaacagacgattacgtctacgccattaaacgttcgatttaaaaatgtgaatgacggatcggttgaaggtttaatgcataaagaccttcctgttatgtcggttcaatatcatccagaagcacatcctggaccaagtgacagcacgtatatctttgatgaatttatgacgaaagtacagcaagtagggagcggaaaagtatatgcctaaagaccaaacgttaaaaaagattttagtaatcggatcaggaccaatcgtaatcgggcaagcagcagaatttgattattcaggaactcaggcatgcttgtcattaaaagaagaaggttatgaagttatcttaatcaataataatccagctacaattatgacggacactcacgtagcagaccgaatctattttgaaccattaacagtagactgcgtagagaaaattattgcaaaagaaaagccggacggtttgttagcaacattaggtggacagacgggtttaaacttagcacttgagcttcatgaacaaaacattttgccaaaatatgatgtgaaacttttaggaacgccgattgaatcaatcaaaaaaggtgaaagtcgtgaagagttccgcgcattgatgaatgaactgaatgaaccggtgccggaaagtgaagttgttacaaaagtagaagaagcgttagcttttgccaagaaaattggttttcctgttattgtacgtcctgcttatacgctaggcggaacgggcggaggaattgctcattctatggaagagcttgaaaagctttcagcgtcaggtttgcgtgaaagtgctattactcagtgcttaattgaaaaaagcatcgccggatttaaagaggttgagtacgaggttatgcgtgacgtaaacaatacgtgcatcacaatttgtaatatggagaacatcgatcccgtaggcgtccatactggagattcggtggtcgttgctccttctcaaacactaacagacgtggaatatcaaatgcttcgctctgcttcagttaaaattatttcatcgcttggcattattgggggttgcaacattcagtttgcgcttgatccaaaaagcaagcagtactatttaattgaagtaaatccgcgtgtgagccgttcgtctgctcttgcatcaaaagcaactggctatccgattgccaaaattgctgcaaagctatcggtaggctacacgcttcatgaattattaaatcctgtgacaggagacacgtatgcaagctttgaacctgctcttgactatgtagtagtgaaatttccaagatggccgtttgacaagtttttctacgctgaaagaacgcttggtacgcaaatgaaagcaactggagaagtaatggctattgaccgtaactttacacgtagcttccaaaaagcattatcttctttagaaattgacttacaaggattagaagtagaagaactgcaagaactttcaacggatgaattaaaaagcaggctaggcgaacaaagcgatgagcgtatttttgttatccttgagcttttacgccgcggcacaacgcctgagtatatccatgaagtaacacaaattgattatttctatttaacacactttgcacagctgattaaaatggaagcatctttaaaagaagtacgttttgattcgattacagctgaacaattcaagcaagtgaaggaacatggttttacagatgcgtatctagcagacgtatggaatgtgccagaacttgaggtaagagcgaaacgtaaagcactacatattacgccaagctataaaatggtggatacatgtgcagcggagtttgaatcttcaacggcgtatttctactctagttactacggcgaaagtgagattgaaccatcaacgaataaaaaagttgcgattatcggttctggaccaattcgtatcgggcaaggagtagagttcgactacagctctgtacacggtgtgctagctcttgaaaaagaaggatacgaaacgattttaattaacaataatccagaaacggtaagtacagattttgaagtagcagatcgcttatattttgaacctgtaacagtagaggacgtattaaatgttcttgatgctgaaaatgtgacggatgtaattgttcaatacggaggtcaaacggctatttcgcttgttaaaggtctagaagaagctggcgttaatttactagggattacaaatgatgtcattgatgcacttgaagatcgtgacctgttttataagctcttagatgactgtgatattccgcatatcccaggtgaaatggcgaaggacgcgaaagaacttgtaaaaaaagcaaaagatatgggcttcccattacttattcgtccttcttacgtgattggcggaaaaggaatgctgacaattcaaaacgaaacggagctgcaggcttgtttaccggctattaaagcttctcatttcccaatgcttattgatgcttacttcccgggaaaagaagcagaagttgacgtggtagcagatggaaaagatgtgttgattccgacaatcgttgaacatattgaaaaagccggcgttcattcaggagacagctatgcgcttttaccagcaaaaacagtagaagcagcgcataaagaaaaaatggtgagctacgctcaaaaaattgtaaacaaacttcaatataaagggattatgaatatccaatatgttatttacaacgatgaagtctacatgctggaagttaatccgcgtgccagccgtacagtgcctgtagtaagcaaagtgtgcaacacgccgcttgtttcgctatcaactcaaatattgcttgggaaatcattgtcggaaattagtgaaaagctaggtttattgccggatccggcttacacaactatcaagtttccagtgttttcgacaagtaaattatcaggagttgatccacttgttggaccagaaatgaagtcaactggtgaaggaattgcgatttcttcaacgattgaagaagcagcaaaaaaagtattccatcagtatgtgttaagtaaaaaaggtgctgcagaagtgtatatcaacggagaggcgcagggccttgaagagcttgcgcaaagcgcgggattaactcttgttaaagataaagaagttagtgaatgggtgaaaacgaaagaagctttattatatgtaagtttacagcctgaagataaagaaagccgtatgtcagcattaaaacacggtttaatggttatgacggaggcagaaacggcttcgctatttttccaatcgttccaagtcgatgaatatcacgtttcatcactgcaagaatggtttcaaaaaactaaaaaggaagtgacagtatcatgagtacagtctcggtaaatacgaatttaaaaggaaaagatttgcttacacttaaagatttatcatcagacgatattatgtcacttttagaaagcgccattgaactgaaagaaaagcataaaaatggtgaaatcgtaacatcgttaaaaggaaaaacgctggggctcatttttgaaaaatcttcaacaagaacaagagtctcatttgaagcgggaatgatgcagcttggaggaaacgccctctttttaagcagccaagatttacagattggacgcggagaaacgattgctgatacagcacgcgtactatctgaattcatcgatgctataatgattcgtacgtttgaacacagcaagatcgaagagcttgcagattacgcatccattcccgttattaatggtttgacagatgattatcatccttgtcaggctctagctgatttattaacgatctacgagcacaagaaatcatttgaagggctaaaagtagcgtatgttggagacggaaataatgtagcgcattcgttaatgattgcctgtgcaaaaatggggatagatatttcaattggatgccctgatggatatgagccaaaagactttgtaacagcttatgttcatgaaatagctgctacaacaggtgcgaaggttacgattacaaaagatcctatagaagctgtgaaaaatgccgatgctatttatgcagacgtatggacaagtatgggacaggaagaagaagcacagcaacgcttgaaaatatttgctccttatcaagtaaatgaagaactagcttcctatgctaagtcagactatttatttctgcactgtttgcctgcgcatcgtgaagaagaagtaacagcaagcgttattgacggaccaaattctgttgtttttcagcaggctggaaatcgtatgcatgtacaaaaagctttgctgcaagccattttagcttaagagaaaaaccctttctgagaatatcagaaggggttttttgtttaaagggaattaattgtgggaacatcaactgtatactaaacagaacgaaaggtgatttatgatgaaagtattagttgttggagcaaacggaacaacgggaaaacaagtggtagaaaaagttgcaaacagcaagcatcacgaagcttatgcgatgattcgcgacgaaaagcaagcagacgcgttaaagaagctgggtgccaacgttgtgcttggtgacttggagcaagatgtttcagatgctttaaaaggtatggacgctgtcatatttgcagcaggttctggaggacatacgggagacgaaaaaacaatcgctgtggatcaaaacggcgctaaaaatatcattgatgaagcaaaaaatcaaggtgcaaagcgctttgttatgttaagttcaatgggaacagacgcacctgaacaaggaccagaaggcttacagctttacctgcgtgcgaaagcgatagcggatgaatacttaaagcagtctaatctacagtatacaattgtacgaccaggaactttatcgaatgatcaagctactgggaaaattgatatcaataatgatattgaagataaatctcagacgattccccgagcagatgtagcagccgtgcttgtagaatgtctaaacgaagaagctacgataggaaaaacgtttgaaatgctagctggagaaactgaaatcgaacaagctatcaaatttactcattaatataaaagggcggatctaaaggtctgctctttttctctgcctaatatgaaaacatctccattatgaaacagaaatcttaagggaatagtataggagaacatttcatttcaggaatgaggaggcaggacaatgggacaaaatcgtcatttcacaccgggtcaaaaagctcctaataacggagtgtatattgaaattggtgaaacaggaagtaacgtaaataatcctcaaaaggttaaattaaaagcaggagagcgttttccagagacggccaacgatgatcgccactggacgtacatgcgtaagccttaaatagtaaaaaataaagaagccattctaaattgaatggctttacttgttttcctattgctgggtataatgaaataaaggtcaataaaggtcaaatgtatcgaaggaggatgttcaatggatataaataaaatgacccaaaaattgcaagaaggcgtgatggaagcgcagtccgaagctattaaacgaaatcagcaggaagtggatattgctcatttgctatatacgctcattcatcagcaagatggtattgctcctcgcatattagatcatttacatatagatcatcaatcttttcagcagcaggtaaatcaattgcttgcgaaaaaaccagccgttacaggaagtggtgctgaagcagggaaggtttatattacgaataaacttcagcagctgtttgttaaagctcaagaagaagcatctcgtttgcaagatgattacgtttcagttgagcacatctttttagcattagcacaggaaccgtcttctagtgaatatggcaagttattttcaagtcacggtataacaaaaaaagctctgcaagatgtgcttaccagccttcgaggaaatcagcgaattacaagtcaaaatcccgaagtcacatatgaagcgttagctaaatatggaagagacttagtagcagaagtacgagcaggcaacattgatccagtcattggacgagacggagaaattcgccgcgttatccgcattttatcgcgaaaaacaaaaaacaatccagttttgataggagaacctggcgttggtaaaacagcgattgttgaaggtctagcacagcgtattgttcgccgagatgtgcctgaaggattaaaagataaaaccatcttttcattagatatgggagctttagtagcaggagcgaaattcaggggagaatttgaagagcgtttaaaagctgttcttcaagaagttaagaaaagcaacggtcaaattcttttattcattgatgagcttcatacaatcgttggagcaggccgtacggatggagcgatggatgcagggaacattttaaaaccaatgcttgctagaggagaacttcactgtataggagctacaactcttgatgagtatcgtcagtatattgaaaaagatccagcgcttgaaagacgctttcaacaggtactggttgaagaaccttccgtagaagatacaatctctattttacgtggtttaaaagaacgatttgaaattcatcacggcgtgaatattcacgaccgagcgattgtttcagcagcggttatgtctgatcgttatatatcagatcgctttttacctgataaagcaattgatttaattgatgaagcatgcgcaactattcgaacagaaattgattcgatgccatcagaattagatgaagttacacgacgtgtcatgcagcttgaaattgaagaagcggcattaagtaaagaaacagatcaagcaagcatcacaaggttagaggcaattcgaaaagaagtctctgatttaagagaacgtgcagatacaatgaagctgcagtgggaaaaagaaaagcagtcgattcaaacggtgcaagatgtccgggagcagcttgaaaaagcgaagcgagacctagaagaagctgaagggaaatatgatttaaataaagcagctgaacttcgccacggacgcattccagctcttgaaaaagaactaaaacagctggaagaaacagctgctgaaaaagcacaagaaaaccgtttgttaagagaagaagtaacagaagaagaaattgctgaaattgtaggaagatggacgggaattccggtatcaaaactagttgaaggggaaagagaaaagctgttgaagcttgagtcaattttacagcagcgtgtgattggacaagatgaagctgtatccttagtgacggatgctgtgattcgcgcacgggcaggcattaaagacccgaaccgtccgattgggtcatttattttcctaggacctaccggagtaggaaaaacggagctagccaaaacgctggcacattctttatttgacagtgaagaacaaatggttcgtattgatatgtctgagtacatggaaaagcatgcggtctctaggcttataggagcgcctcctggctatgtaggatacgaagaaggcggccagctaacggaagcggtgagacgcaagccttattcagtcgttttgttagatgaaattgaaaaagcccatcccgaagtatttaatgtgctccttcaaatactagatgatggaagagcaacagattcaaaaggaaaagtcattgattttaaaaatacagttattattatgacgtcgaatatcggttctcaatttttattagacggtttaacaagtgaaggcgagattactgaaaaagccagagagcaagtgatggctcaattaagacagcattttcgtccagaattcttaaatcgagtagacgacacgattttattcaaaccgctaactgttcatgaagtaaaagggattattgataagctattggttcagcttgaaaagcgtttatccgatcgtcatatttcgttaacgttaacagaagaagcaaaaaattatattgcagcctccggatttgatccggtatacggagctcgccctttaaaaaggtttattcaaaaatatattgaaacaaaaattgccagagaattaattgcagggcaaattgaagattatagtcaagtgacagttgatgtaaaagatgatgagtttgttgtcagcgtataagttttctaaaaagatcattcatgataaattgaatggtctttttttgctattaaaagcagctcttcttttaaaataaatgaaaagaaatgaaagaaaatacgtgaaagctaagcgtaaaaacttattcagttttaggttgtagaatatatctaattcatttatgataatacaaaatgggcaaaggagcatgaatgagcacatgaaggaccgtatagagcttatatatgacgaagcatacgattttatagatcaggcattaactaaaataagagcgctggataaaaatgatcttcaagctgaaaatgaagaagtgcaggaaaaggcagaacggacagagtttgcacttcaagctgcacgagatattttagaaaatatgattatcccgggtaaaaaattgacttttatttacgaaaaaggttctgtggtagtagaaattcccgataaaaaataaaaacgacttccttttatggaagtcgtttttattttggcaatgcaaagtgctcatcaatggatgcatcactttttcgatactgcccgggtgtcatattggtcgttttgcgaaatacttttgttaaataattggcatttgcatagccgacgttttcagcaatttcttcgattgagtacttggtttgatgcaatagctcggccgctttttgaatgcgaagcttcgttaagtattgaatcggcgtaatcccagtcgtttgtttgaataaccggctaaaatgatagcgagataaatgagctgcatctgccatttcatccggaccgatttcttcatgataatgattacgggcaaataaaatagagctaatgatactttcaggccaatcctctgtaaaactatccatgcttttaatatattgatacagctccattacaaagcggtaagataagcttgaggcatgaaatggatctgctatatgtttttcacttgcccgcttatatatttgagcaagcagctgaacaggtgctgattcagggtgaaatcgaattacaggggagtgggttgactgaatataatcccagcatttttgtacttcatctccgtataatgtaagaaaaataaactcccagttttcactttcctttggtaagtaatagcgataatttccaggtatattgacgatgaatgcttttccagcatccactttatattcttttccatctatttcaatcatcccgtacccagaaacagtgtattgaaaaatatattttcctacatcttttcgctggtttccgctccagttataaaggggagagaacacttcatcccatccaaccgaccatagctgcgcaacttcatttgtgcgggattctaaaaacctgtatgcgtacgttgaatattcttgagcttggaaatgtgagagcaaattttcaccttctttttgaaataaagtagtacttaattcttactttaacgtaatcgctttcatttttctataattttttgaaaatatcgtgattatttttaggggatgtctctaaatctattattttcatatcatttgcaagtcaaggcttacataaagataacacctttttggcgtaagagtagttcatcgtcaattcaaaagaatcatttttaaagtgataagcaaaaaagtaccgattatcaatagtaattttaccattgaggcaaagaaaaatggactttacaatgtacatatgaatccgtttccaaaaaaatacttaaaataggtgataataaatgctgggaaaattaatcgaagagttcaaacaaatatttcattcgtcagaagctattcgctacttttttgcgccaggacgtgtcaatttaattggagaacatactgattataatggagggcatgtttttccttgttcattgagtataggaacgtatgcggtagtacaaaaacgtcatgatcgaaaaatacgtatgtactctaaaaacttctctgaagcaggagttattgaatcctctctagagcaattaacgtacaaaaccgaagatgattgggctaattatccaaaaggagtaatggacacctttaaaaagcacggatatgatcttccttttggttttgatatcttgttttttggcaatattcctaacggagcagggctttcatcatcagcatcaattgagttagtcacatgcgtacttttaaataaaatttttgaattgaatattgatatgatggaccttgtaaaaatggcgcagcaagctgaaaatgaatttatcggcgtaagctgcgggattatggatcagtttgcaattggaatgggaaaggaaaatcaagccgtattgttaaactgtcaaactcttgaataccagtatagcccgctgcaattaacagatgctgtgctcgttatttctaatacaaataagcgaagaggactggcagactcaaaatataatgaacgccgcatggagtgtgaaagagcgctgtcagatttgcaaacgtcactttctattaattcgcttggtgatttaaccaaagagcaatttgaaaagtacaagtttttgatacaaaatgaagtagattgtaagcgcgctaaacatgcggtatatgaaaatgaacgcacaaaagaagcggttgctaaattgcaaaacggtgatttaaaagggtttggtcaattgatgaatgaatcgcactgctcactgcgagatgactatgaagtaagtgggaaagaactagatgctcttgtagaagcagcttggttgcaagaaggtgtgattggatcacgcatgacgggtgcaggctttggcggctgtacaattagcatcgtacaaaaagcacaggttgataggtttattgaacaagtaagggatacctattatgagaaaacgagtttagaagctgaattttatgtggttaccgttggagaaggagcgcgtgaactcacattagaagcagtataagagaaaacacagatagagaaaggaacgagtgtatgtcagtcaacattcatgaagaaatcacccgacttattcaatatggtttacaaaagaatctattaacaaaatgggatatagatgtggtgagaaataaactgctggaagtgttaaagctcgacgaatgtattatagtagaagtcaaagaagaacgtctggaacatccagctgctattttagacaacatgcttgattgggctgcagaaaacaatcgaatcgccgagaattctatcacgtatagagatttattcgataccaaaataatgggatgctttgcaagcatgccttcagaggttaatcggacattttatgaacactatcagcaaagcccccaaaaagccacaagctattattataagctgtcaaaagacattcactatattcgcagagaccgaattgctaaaaacgaaagatgggtaacaaacactgactttggagaacttgaaattactattaacttatccaagccggaaaaagatcccaaagcaattgcagcaagcaaatcattgaaggaaagcaactatccgctgtgtctgctctgtaaagaaaatgctggttatgcaggtcgtattaaccacccagctcgtcaaaatcatcggattattcctgtggaattacaggaagagctgtggtacatgcagttttcaccttatgtttattataatgaacatgccattgtttttgcgagtgaacatacacccatgcatatttcaaggcaaacgtttaagcggctgcttgccttcgttgaacaatttccacattattttttaggatcaaatgcagatctacccatcgtaggaggatctattttaactcatgaccactttcaaggcggctatcatgattttcctatggctaaagcaaaaataaataaattgttctctcttaaagcatatccagacgtgaaagctggaattgttcattggccgatgtcggtcgttcgtcttcaaagttcgcaccttacaccattagtagaagcagcggatttcattttgaagaaatggaaatcatatagtgatcaaagtgctgatattttagcttttacagatcaaactcctcacaacacggtcacgcctattgctaggaaaagaggggatttgtacgaattagatttagtactgcgaaacaatcgaacaaacggcaaacatccaggtggcatttatcatccgcatgcagaagttcatcatatcaaaaaagagaacataggtttaatcgaagtaatggggcttgcggttttacctggtcgtttgaaagacgaaatgagtctagtggccaaagggttagttcagaataacctgaacgagttagccagcagacatgatcaagtgcaaaaacacgtaaaatgggccgaacaaatcgagaaaaaatatccacatattgaagagcaaaatgtccaaagcattctccaacaagagctcggtttggtttttgcaactatcttagaacatgcaggtgtgtttaaacaaaacactgaaggacagctcgcattcagtcgttttatgaattcgttaaatgaagcgtaaatcattaataaaagcaggcagctcattatgagctgcctgcttttatacagttagggcatgctgttttaaaagggtatacagagcctgtgttcctttattatcatcgccttgtttttcgagctgttcataaagcgattttgctaactttagccctggtgtatacagctccatttcttcagctgattcaatggcaattttcatatctttaataaagtgtttaatataaaaacctggttcgaagtctcctttaatcatgcgaggagctaaattgcttaacgaccagcttccagctgctcctgtttcaatactttttaaaacggtgtttggatctaacccagctctttcagcatagagtatcgcttcacacacgcccatcatattagaggcaatagcaatttgattgcacatttttgtatgttgaccagcaccagaacttccttgaagaacgatatttgttcccattttttcaagaataggcgtaacggcagagaatgcttcagaatcccctcctaccataatcgctaatgttgctttctgagccccaatatcccctcctgaaacaggagcgtcaagcgcatgaatgtgcttctcttttgctgcttgataaatctcacgagcaagtatagggcttgatgtcgtcatatcaattgtatagcagcctttctttgcattatgtataatgccgtctttgcctaaataaatctcttttacatcgtgaggatagcctaccatggtgataataacatcagattgttcggccacttcttgaacggtttctttccagttggcccctttttcaagtagtgcttgagcacgagtttttgttcgcgtataaacaaggacttcatatcctgcgtcaattaaatgcccggccatgctttgacccataacgcctgttccgataaaaccaattttttctttagtcacagcagtattcactcctataattaatagtttgattattctaaaattatatagttaaaggttaggataatcaatgattatgaatgtatataaatgtaaaaaatagcttcaatcatttgttttgaatacgagttaacgaaagaaattgctgagaagagcttatgctaaaagataaaaaaagcgctggctttacagccaacactttttagtgatgattatttgctggtttattcggtacacccagttctccaatcaaaattacaactagcgtgaaaactactccaaggatggaagcggttgcgaaactgtaagtaccgcccgtcattgcagagattacgtacactgccatattcattagtaaaaagccccaaacaaaagccattacgacacgcattctattcacctcgtttacagtacagtttgatttcattttagcatatagcagtcaaataagaaattgaattttttatgaataaataaggggcgtgttcccatgcagaaacaaaagagcaataagtcagaaataggcattattctagtgcgctttttgatggttctatcatacactgtatggaacaactagtaagttacggaggaagagctatgatacatcgacgcttttttagcttagatacgcaatggaatgtcgtacatgtccctgaacgaccgaatggtttcggtgtgttagtattgggtgataaagatcattttgttgaaagttcaactagcttatggattcagcacggcggaaggtcacagctgttgcaatgtttacaagatgaaggatacacagtattttattccaatttatatggccggcattgggggtctccagaagcatatcaccttgcaaaacaactttatcatttagtaatgaaacaagaaattttaaataaacgaattcatattttagctgaaggaatgggggctctgttagcgctgcagctaatggaaaatgacgggaatacgttcgttcgatcagctggtttactaaatccatgtattgatcttcatacgcatgcagaacatgaaaaaaacaataaattcttttataaacaattcacgaaggacttgactcaagcttataaagtggagcggaagcaagtatcaaagttaattaaggagtacccttctgttacagaattaaaatcaacgctgcccgtgaaaatatggacggcgcctaatgcctctactcattatccaattgcacacagtaaaaaatatgaactacatcgtgaagaacttcactctcctattatgctttcactttatttaccggaaaaaaactatttgtttgaacggtcccttctccaattttataaacagcatgaaaaagtgttataagcaaagcttctatgattatacatatcataggggctttttgtataagagataaaatgaaaaaagagttcatgatgcttttacagatgagcttctttgaaataaggaacgagtgccctctataactatagggatttaagctttttgttgagtaaatgatgaatgaagaattggaggaagcgatatgggaaatgtagtagtaataggggcaaaccgctttattggttttcatttatgtatggcttttttagacgaaggtacagaagtaaaagggtatacacattctgctcataaagaagaagatgatttgcaggaagagatgaaatttttcttagggcgaaacgctaattatgcatcgactgaagtaggagagtcattagatatgattacctcagaaacggatgttgtctactttacgtatttcgatggaggagacttttatcatcctgattttttaagacaagaaatgcaaaaagcgcagcaagtgctcattcaagcgcttaacaaatgccgtcaattcaacattcgatttgtgtttgtttctaccatgcgcgtatttggagaccagcagcgaaagattgaagaaacaacgattccagaaccggacagtagtgaaggaaggctatacgttcattttgagcgaatgatagaaaaatataaagatgatggatggcccattataattgtcagaacgccgactctttacggaccttggcagcctttgtcaatgtgctattccaaaaatattgccgggtacgaagaggcttttgacattatggaaggcacggattttattatttatattgaagatgccgtcagtgcacttagacgctgtaaaactgctgcatattcatatgaagtgattcatttagttgaagaaaagttacagccttggagcgcaggagcaaacattactcatatggaggtgaaggaagaagcggctcaagaaaaatatgaaatcagcaggaaagcgaaagaactgctgcaattttcttcaaaagtaacggctaaagaaggcatttatctgcaaaaaaaacatatgagaacattctttttacctcttcattaaaaggagaaagttgtacttatagaatagattcgctaatataaggaggaataaatgtttttaataaaggagatttcactatggaagagcaaaatatgcaattcatgcaaattgcaatgaagtacttgccagaagcaaaacagatcttagatgaaacaggcgttgagttatcaatggaacacgtacagccggtattgacattactaacaaaagtaatgaaggatgcctatgagcttggcaagcaagatgcattagctgaaaatgaaaacaactaaagaaaacagctcggtagaatccgagctgttatttttgtttggaaaataaatcgactaaaggggcaaactgtttaagaagaggagctagttcttcgacagcgagtacaatttcatcgatttgtttaaataatcgttcccactcctctcgctctctttcttcttttgattttctgcgcccagctccaaacataaaatcagaaaaaccttcatttctttgtcttcttgccatgatactcattcctttcactattttaatggtgggtaagttcttacttaatgtcccatactagagtaagagggtcccgtatgattactatatgtagcatgatagatacctgagtaggacgaacacctatatagacaaaaaataaaaaatgaagtaaaattagtaccaactcataataattgattatataatcgataaatgaaatgacggatataggttttataggaatataagccttttatttaaaggagaggttgatatgaacgctggtgttctaggaattggacgttatgtaccagagaaagttgtaacaaatttagatcttgaaaaagtaatggatacatcagatgagtggattcgtacgcgcacaggtattcaagagcgccgaattgcagccgataacgaggacacatctgatttagcttataaagcagcagttgaagctttacataaagctaacgtcgaggcagaagatattgacatgatcattgttgctacggtaacgccagatcaaccgtttcctacagtatcatgtatgctacaagaaaaattgggagcaaaaaaagcagcttcttacgatgtgagcgccgcatgtgcagggtttatgtacggcatgattacagctaagcaatttattgaaaccaatgcttacaggcatatattagtggtcggtgtagaaaagctttctaagattacagattgggacgaccgtaacacggctgttttattcggagacggagcaggtgcagttgtaatgggacctgtatcagaaggacgaggtattttatcctttgaactagggtcggacggtacgggaggcaagcacttgtatcaaaacgagcttgatcatattgtcatgaacggacgtgaagtatttaagtttgctgttcgacaaatgggggaatctgctgttaatgtaattgaaaaagcaggtttaacaaaagaggatgttgattttctcgtacctcatcaagcgaatattcgtattatggaagctgcaagacagcgattagacttgcctgaagaaaaaatgtctaaaacaatccaatactacggcaatacatcagcagcatcgattccaatttcaattgttcatgagcttgaagcagggaaaattcaagatgatgatttaattgtaatggttggtttcggaggcggcttaacatggggagctattgctattagatggggaaaataacactacatttttaaagcaactgaaggagatgaatgtacgatgaataaaaaacgtgtagttgtaacaggacttggtgggcttacaccaattggaaatgacgtagaaacagcttggaaaaacgcagtagcaggcgtgtctggcgttggtcctttaacaagactagatgcaaatgaattcccggctaaagtagcggctgaagtaaaagattttaacgtggaagattttattgaccgcaaagaggctcgtaagatggatcgctttactcaatatgcaatggtagctgcattggcggctgttaaagatgcggatttgactattacagaagaaattgctccaaacgtcggcgtttggattggttctggaattggcggtatggaaacgtttgaaaaccaatattcaacgttattagaaaaaggtgcccgccgtgtaagtccattcttcattccgatgatgattcctgatatggcaacaggacaagtttctattgctttaggggcgaaaggcgtgaactcttgtacggtaacggcatgtgcaacaggtacaaactctattggtgatgcgtttaaagtcattcaacgcggagatgcagacgtgatggtgacgggcggtacggaagcgccaatcacgcgtttatctattgctggtttctgtgcgaataaagcactttctacaaatccagatcctgcaacagcatctcgtccgtttgataaagagcgcgacggcttcgttatgggagaaggtgcaggtgttattgtgcttgaagagcttgaacatgcactagcgcgcggcgcacgtatttatgctgaaattgtgggctatggttcaacaggagatgctcaccatatcacagcgccagctccaggaggagaaggcggcgttcgtgcaatgcgtcatgcgattgaagatgcaggcctacagccaagtgatattgattacatcaatgctcacggtacaagtacaggatacaatgataaatttgaaacaatggctattaaagaagtatttggcgaccacgctcaaaaagtagcgattagttcaacaaagtcaatgactggccacttgttaggagctgctggcggagtagaagctatttttagtgtgaaggcaattcaagacggtattcttcctccaacaattaactatcaaacacctgatgaagagtgcgatttagactacattccaaataaagcgcgtaagcaagaagtaaaagcggtgctcagcaactcacttggatttggcggtcacaatgcaacaatcatctttaaaaaatacgaagcataatgaaaaattctaggctgatgcctagaattttttttatttttaataaccaaaagagtagctgtgaacatatcatgaaacaaaaggaagaagaaagtgaggggaaaacatgccgattgtttcaacttctacttggacggagccgaaagaaataagccgttatctcgcgcgctattttaagaaattaaaagaaaaagaatatatggaattactttttaactatggaatgtgtccgccttctttaatgtttataaaagaattagaagaaatgaagaaaagacaggtttggaagaaagttaaagcacattatgagaagcttaaaaaagcatggaatgggcccgatgtagcggtgctagtgcttccaagcaatcctagaaatcgaaaaatgcagcgtgaatttaatggaagagcaggtgtcgcttttaccgataaattatttgtgtttatgacaagtcatacatccgatgaagaaatgttagcagtgcttacccatgaataccatcacgtttgcaggctaaaagccattaataaatctgatgaaacgattactttgttagacgctatgatgatggaagggttagctgaaagagctgtagaggagtattgtggtaaaaaatatttagctccgtggacaaattattataccattgaagaagctaaaaaaatgtgggaaaagcatgttaaaccttattacaatctgcgcgccgacgaaaagaaatatgatcaactgttattcggccaaaattggtatccagaaatgatgggctacaatattggttatcatcttgttacttcatgtatgaagcctcacactttaactactacccagctgcttcctcttagcaccaatactatcttaaaaaaatctgcgttccaactgtaaaaaaacaagttctatatacctaaagttaaaaatagtaaattttatcctatttccaacaaaaaattaggaggtttatgcgttaaagtgccgaagagatatttagaaatcattattttaaaaataaaaaatataattaattttcaaaatatattgattttgtaatgaaattgtaataatatcttattcaaatataacaatttttagaaaaatgaggtgtgcactataaatggataaaaagcccgtcgaattaacacctttactagaagtgaaaaatttacaaactgctttttccattaatgattcctggcataatgctgtggacgacgtgtcgtttcaagtcggacgaaagcgaattataggggttgtaggagaatctggctgtggaaaaagcgtattgtctttatccgtcattgggctgttacctaaagtaaatagtcaaattagaagcggaagcgttttatttaacggaaagaatcttacgcacttatcagaagatgagatgaatgatgttcgggggaaagatatctcaatgattttccaagaaccaatgacatcccttaatcctgtgttaaccattgggtatcagctgcaggaagtattgtttaaccatatgaatatatccaaagcggaagcgcgtgaaaaaagcattgcgcttttaaaaagcgttggtatttcgagatccgaaaagctcatcgatgaatatccgcatcagctgtcaggaggaatgaggcagcgtgtcatgattgccatggcggtagcttgtcagcctaaacttttaattgctgatgagccgacaacggccctagatgttacggttcaagctcaaattttagaattgctaaaagaaattcaagaaagcaatgatatgtctattattatgattacacatgatttaggagtagttgctgagatgtgtgatgaagtgattgtcatgtatggcggaaaaattgtggagcatacagatgttgatacgttattttatgccccaaaacatccgtacacgaaagcgcttcttcactcaattccacgcatggaagatgatgtagaagtattaaatacgatcaaaggaattgtgccttctcttgtaaacatgccgcggacaggctgtcgtttcgttaaccgatgtcctcatgcaatggaagactgcagttccgttacgcctgttcttcgccaggattcacaggggcatgatgtcgcatgtctgctgtataaaaatagctatccgtcaaaaggagtgaagacaagctaatgactaaagcagtgaaagatgtattgctagaagttcagcatttaaaaacctactatcctattcacggcggatttttccgaaagaaaattggtgatgtaaaagcagttgacggtatttcttttgctattcgaaaaggagaaacgctcggtctagtaggagaatctggctgtggaaaatccacggcaggaagaacgattctaagactgttggaaccaactagcggaaaaattattttcgatggtaaagatatcacagaagcaaaaggaacttctctccgtaaaattagacaagattttcaaatggtttttcaagatccctatgcttccctcaacccaatgcaaatggttggagatgttatttctgaaccaattcggaattttacaggaaaatcaaccaatcaattaaaatcagaagttatgaatctacttacaaaagtagggttaccggaagatgcatactataaatatcctcacgaattttccggtggacagcgtcagcggattggaattgcacgtgcacttgcacttcgtccaaaacttattattgctgatgaaccggtatcggcactcgacgtttctgtccaatcacaagttttaaaccttctaaaagaacttcaacaagaattcgacctaacctttttatttattgcccatgatttgagtgttgttaaacatatgagtgatcgtatcggtgttatgtacctaggcggtttagtggaaattgctgataagaaaagtctgtacgcagagccattgcacccttatacgcaagcgcttgtatcggctatacctgaaccagatccgcgaaagaaaaaacagcgtattattttacagggagatgtgccaagtccaattgatccgccaaaaggctgtgcgtttcatcctcgctgtatacatgcaatggcggagtgcagccaaacgaaacctgccttaaaggaggtgagacctggccatcaagtagcttgccatttatataactcgtaaaagctacatacgaacagattattagttaaatagggggaacgtcatgatgaaaaagaaatcgtttttatcacttgtttccattttgcttgtgctatcgctttttctagcggcatgcagcggtggaagcagttcttcatcttctagtaataaagaaggcggagaaacaaaaactgaaggtgcaaaaacagacaagccaaaagatggcggaacgattacgtatgggattgacggagcgccggaagggctttttgagtacgcattgtatggtagtgcatatgatagccaaatcttagaatttatcaatgaaggtctctttacttatgataagaaattaaaaattaaatctgacttagctacttggaacgtgagtggtgataaactaacttacacgtttaaattaaaaaaggggattaagtggcataacggagatccattaactgcagatgattttaaatatacgtatgaaacgattgccgataaagactatacaggtccacgctatgtaaacgttgagcacattaaaggcgctcaagaatatcacgacggcaaagcggattctatttccggagttgaagtagtagatccacaaacatttaaagtaacgtttaaagaagttcgtgtaaataacttagacaatctatggccgtatccaatgccgaaaaagtactacgaaggaattgctgtaaaagatcttgcggagtccaaacaagttcgtaaagagcctattggtgttgggccgtttaaagtgaaaaaagtagtagcaagtgaatatgtccaaatggaacgtaatgatgattattggaaaggtaaacctcaccttgatggtgttgttgtaaaagtactggatccatctgtttccgccggagcattgaaaaaaggcgatgtcgacattatggatgttcgcccagctgatctagggcaagttgaaaaagcagaaaacttagactttttggaagggaaatcaactagttattcgtatattggtctacgatttggacatcgtgatcaaaaagctggtaaaaacgtagatgattacgaaaagttcaaagatctaaaacttcgtcaagcattgctttatgcaatagatagaaaagcaatggtaaaagcatttatgaacgacaaagcggttgtttctaacacagttattccgtctgtattctggattgctgctgaccaaaaagatttaacaaagtacaagtatagtcctgaaaaagctaaaaaattattagctgaagctggttataaagacaagaataatgacggttttgtagaagatccaaacggaaaaccatttacgatttcattcggtcactatgctggtccagctaacttcgagggtcgtgcgaaggctattatgcaagcatggaatgatattggtattaaaacaaaattagcaacgggttcacttgttgaatttaacttgtacaatgaaatgaaagataacgacgataaggcgttagaagcgttctttggttcttgggacactggttcagatccagatcctacaggattatggagctctgatgctgaatggaactatggacgttgggtaaataaggaatctgatgaaatgcttaaagacggtttgagtgaaaaatcatttgatgataaataccgtaaagatgtatatgtaaaatggcaaaaattctttaatgagcagctgccagtacttcctttatgggaaaatatcaatatttatgctgtgaataagcgtgtgaaaaacgtaactctagatccatcaacggtagttgtagatccggagaaatggtctgtaacggaataagtattttacatgtaaaggagagtcaacgatgctgcaatactcactaagacgtattttagggatgattccaatgttgattctgatctcctttgttgtgttttccctggcaaaaatgatgccaggggacccttttgggggagaaatcaaccctagtaatacagatccaaaatacattgaggaaatgcgtgataagctaggatataacgatcctatctacgttcaatattggaactgggtaaagggagtggcacaaggagatttaggaaagtcaacaactcataagttaccgacattagatattattttagagcgtatgcctaatactatctttttagctttgacttcgcttttgattacgtatgtgtttgcatttattttaggtatgtatgcaggaagaaaaccgtataccttagcagataactttattgcaggatataattactttgcattagcggttccatcgtttatcgcagggatcgtaggcatttatttattttcctttcagttaggttggtttccatttagcggttctgttgaagtaggattgaaagagggatcatgggaatttattcaaagtagaattcatcacgttatattacccgcgctgattcttggcttgatgtcgaccgcgcagtatacccaatttttgcgcaatgatattattgaaaacagtcgcaaagattttgtgcgcactgctagagcaaaagggacaaaagaatctaaaatttataatgttcatatcctacgcaactcaatgattccgcttattacgtttttagggtttgatcttgtaacaatcattagcggttctatcattacagagacgatctttacgtatccaggaattggaaaattgtttgttgactctgtagcaactcgtgactactcagttatgatgtcgcttacaatgttgttttcaattttaacactggttgggaatctggttgctgatttgttatacggcgtagcagatccgcgtattcgtttggattaggaggagaaagtatggaaattgtaacgaaaaaagatgtacagccagaagtgaatatgaaagctcctaaaaacctttctccatgggcgattgcgcgaaagaagtttgttaaaaataaactagccatgataagtttagctttcatgattgtgattacgcttcttgccatttttgcaccgctgcttacaaaagcagatattacacgtatcgactatatggcgatgaatgcagcgccttctagtgggcattggtttggaacggatacaaatgggcgagacgtatttgcacgtacattgtatggaggaagaacttcgttactgattggagttgcctgtacaacactcgttattttaatcggaactcttattggttcgattgcgggttattacggaggcaaagtggatcaattcttaatgcgttttacagactttgtattaaactttccgctaattgttttcgttgtagtgttaaatacaatcctaattggaaagatctcaggcgtttggacgctcatcctagttgttagtttcttaagctggggaagtacggcccgactggtgcgaagcaaagtcttggctgaaaaagaaaatgaatatgtgctttcagccgtttccattgggtgcagcccgtttaaaatcatctttaaacatttgctgccaaatgtgttttcaacgattgtggttcaagccagtttgcagatggcgatccttattgtgtttgagtcagcgattagctttatcggttttggcgtgccggctgatacgccaagctgggggaatatgctgacagaagcaagggaatcagatgtgctgcagaataagccttggatgtgggttccgccaggtttagctattacatttacgatcctagctatcaacttcattggtgaaggattaaaagatgctttgaatcccaaatctcttcgttaaaaatctatcacaaaagtgtgatagatttttttaggtttgtcagacctcctgacaaacctattactatagaagaaactcggatttttttctgcttataggggtgaatatagctcatgaagcctttagcaatcattagcactggcgttatatctgagcttcgaaacaagtgcatttgaataatgaccaaaaacgaaggcattttacaattaatttttagaaaaataacatcatttggaataaaaattcctttctctgcctatactgatggataacaaacagatagtaagtgaggggtaaattatgctatatcttcatgatgtatgggttaattggtttgaaggcgaagaaaacggttataatgtgtgtcatttccatgagtggagaaaagacgattgtgtagaactgctcgatcaagcaccgttattaaaagtaaatccgcttttatttcattacattgaaaatgatctttccgagctacctcaacaactactacaagatgtctatcagaaagcatacattcggaaaaatcatgaacgcacgcaggttgaatattgttttattgttacagatggaacgaatattttagcaattgatacgatgggatatcatattccgattcgaaaaagccgcttaattccaagacaggaacagttagtctatgagatgattgcggatcaagaagagctagaatataagttcagtgaagacgagctgaataaaaaagagcatcatattctttcaccgtctcctgaaacgatgagaggactaacacgtaaagaacgtcagctaaaacagctgttatttatggcacttgatcagctacataccacaaaaaatacagctcaaatccgctactggtacacggagtggaatccaacgaagtacgaagatattcaagagatgccgtttcaagacgtgtggagtcagctatacgatgaaacgaagtcagggtggtcaccgaagcataaattattatgcgagcgcttagtaaaaggacaacctttctttgaaaaactttgggaaattgaacaagagccaaaagttaattaaaaaaaaacgactgcatagcagtcgttttttttaacgtttacggccaattcccattgcgtttcgcattttgcgaagcattttattagctgttgtatttgctttatcggcaccttgatctaaaatatcatctagctcgctagaatcaactaattcataatatcttttttgaattggagcgagtgcttcagctaccactttggctgtgtcagctttaaagtcaccataacctttgccttcgtacatcgcttcaatgtcttcgatcgatttattggctaggatcgaataaatacttaataagtttgaaatgcctggcttattttctttatcgtagcgaacaataccttctgaatccgttacggcacttttgattttcttttcaattgttttagcgtcatccaaaagcgtaatgaaagctttttggtttggatcggacttgctcatttttttcgtaggatcttgaagagacatgacgcgtgcgcccacttttggaatacgtacttcaggaatagtgaagatatcattgtattttttgttaaagcgctcagctaagtcacgcgttaattctaaatgctgcttttgatcttcaccaactggaaccaaatcggtgttgtataaaagaatatccgctgccattaatggaggataagttagtaatcctgctgatactgcttcttttccagcggacttatctttaaactgagtcatacgttcaagttcaccgatatacgctacgcactgtaacatccatcccgcttctgtgtgggcaggcacttccgattgaataaataaagtcgattttgctggatcaattcctaccgctacatacagagcagcaaggctgcgaatgtttttacgaagtgctaaacgatcttgaggcgttgtaatcgcatgctgatctacaatacaaaaatgacagttatagtcatgttgaagttcaacaaattgcttcatcgctccaatgtagttacctaaagtgattgtaccgcttggttgaatacctgaaaaaattgttttcatcaaatcttcctttcatctgctcatatatgatgctaatttacggatacaacataaaaaggcccatccgctcctagcataagctaggggcgaatggaccgcgttgccaccctaattagtacacataattgtgaactatctttattcatgtaacgttgaggtcaacgttcaagctttgcacttgaaagctccaaagtccattctgcaggtttcaatgtttgttctcaccagccacaaactctctgaaaatgaaaattctgcatactactctttttcacagctttaattatatagttattcgttattataacgcgaaaaagcaggaatttaaacatcttatcactaaaaagttttataagacaatttactgggatttttcagcggcaaaaaaagacaagaaccttttaattaaagcatttcttgatgaaaatttggtggaggatttggtaaaaatcttttatttaatatttctaatggctttgtaatactatnnnnnnnnnnnnnnnnnnnnnnnnnnnnnnnnnnnnnnnnnnnnnnnnnnnnnnnnnnnnnnnnnnnnnnnnnnnnnnnnnnnnnnnnnnnnnnnnnnnntaatatttctaatggctttgtaatactatcgtaatacctatactacaaaaaagattttagaagtctgacaagtaggcacaatccttataagataaggttttttcccccatgacaaaaaaataccattaaataatagtattgcaataaatttttaaaatatttataataggcgtaacaaacatattttttacaaaggtattacaatttcttaatttttcagaaaacacaaaatagacaatgttttgtttcaattagcgaattttgtaatgaatgagtcttctacatattaagcgcatacattggatttacagcatgtaaacaattgatgacagtttcatagagtagaagaataattttgcagtgaggtctttaatgctctactacatgaaaaaataactgattattttgtattgaaagaggattaagaaattagtgcatatcaaaaaaatatggttgccacacaaacaaaatttaatagggggtaacacgcaatgaagaaaaggttgtcgattcttttcagtttgctgcttgtaatgagcttgtttttagctgcatgtggatttaacaaagaatctggtggcagtgaaaatgctagcagtgatggcggcgaaaagaaaaaagagcaagagcttcgcgtaaacattaaaactgagcctttttcattaaacccaggcttagctaatgattcaacgtcatcaaacgtattattacaaacatttgagggtttaactcgtatcggtaaagatggaaaacctgaaaatgcaatggcgaaagatgtgaaggtcagcgatgatcaaactaaatatacgtttacgattcgcgacgatgcaaaatggtcaaatggtgaccctgtaacagcaaaagatttcgaatatgcatggaaatgggcgttagatcctaaaaacgaatctcaatatgcatatcaattatactatgttaaaaatgcacaagctgccaatgaaggaaaaggttcattagatgatgttgccgttaaagcaacagatgataaaacgcttgaggtaacattagaaaacccaacgccatatttcttagaattaacagctttctatacgtacttcccagtgaatacgaaaattgctgaatcaaatgaaaaatggtacacaaatgcaggcgaaaactatacgtcaaacggtcctttcaagcttaaagcttggaaacataatgacaaaatcgagttagttcctaatgaaaactattgggataaagatgctgtaaaacttaaaaaagttgaaatgtacatgatcaatgataacaacactgaactttcaatgttcaaaaacggtgaattagactgggcgggtatgcctactggtcaattaccggctgatgcacttcctgaattaaagaaagacggttcattaaacattcaagagattgcaggtacttactggtacaagtttaatacagaacaaaaacctttagacaacgtgaacattcgtaaagcattagcttatgcaattgatcgtaaaggtattacagaacaaattacaaaagacggttcagttccagcgatggcggctgtaccaccaacaatgtttgaagataacaaaaaaggttacttcaaagacaatgatgtgaaaaaagcaaaagaatatttagaaaaaggcttgaaagaaatgggccttaaagatgcttcagaactaccagcaattaaggtttcatacaacacggatgaaaaacatgcaaaaattgcacaagctgttcaagatatgtggaagaaaaaccttggcattaaagtacagttagacaactctgagtgggctgtttacattgaaaagttacaccaaggagattatcaagttggacgtatgggctggttaggagattttaacgatccaattaacttcttagaattgttccgtgataaaaaaggcggaaacaatgatacaaactgggaaaacccagaatataaaaagttattaattgactctcaaaaagaaacagatcctaaaaaacgtcaggcaatgttgaaaaaagcagaaggtatcttcatggatgaaatgccagtggcaccaatctacttctacacaaacgcttgggtacaagacaagcagctgaaagatgttgtgatgtctggacttggagacattcagattaagtgggctcattttgagtaagtaacatcaattatgacaaagggtatatggggcctggtgctccatatacttttctttcttgtgcgcgaattttgtaaaaatatggaggtgtgtcagggtgttcaaatatataggaaaacgacttatttatatgtttctatcattatggctaatcgtaacagcaacctttttcttaatgcgtgctgttccgggaggtccattcacatcagaaaagcagcttccccctgaaattcaaaaaaatctaaatcagtattacggtttagaccagccttggtaccatcagtactttgattatttaacatcaattttaaagtgggattttggtccatctttcaaatataaaggccaaacggtaaacgatttgatcaacggcggattccctgtttcattcatgctagggatggaagctattttaatagcaattgctattggtgtagtacttggtgttattgctgccttaaaacataataagtggcaagattacacggcgatggttattgcagttctaggaatctcagttccgagttttattatggcagcggtattacaatacgttctggctatgaaactacaaatttttccggttgcacgctgggaatcttgggcacacacggtgttaccagctctcgcgctcgcttcaacccctatggcatttatcgcacggttaactcgttcgagtatgcttgaagtattaagcaatgattatattcgtacagcgaaagcaaaaggtttaagcagaggcgttattacagttaagcacgccatgcgaaatgcgatgcttccagtcgtatcctatatgggacctttagtagcagggattttaacgggtagctttgttattgaaaaaatatttggtatcccgggattaggttcacactttgtactcagtatctcaaaccgagattatacaacgattatgggcgtaacggtgttctacagtattttactacttttttgtatcttgcttgtagatattgcatacggattcattgaccctcgaattaaacttacaggtgctaagaaaggagagtaactatgtagcaacttccaaaaattcctaaagaaatgtttgaaacagcagggattgaccacgctcaggcagaaaagattgaaaaaccgagtctttcattctggcaagatgtttttattcgttttcgcaaaaacaagcttgctatgtttggtgtagtactaatggttctccttgtttttatggctatatttggtccattgatggtgaaatatgattatgcaaccaatgatttgctgaatgctaatcaggctccatcttctgagcactggttcggtacagatgaattagggcgtgatgtttttgctcgcacgtgggaaggcgctcgtatttcattatttatcgggttagcagcagctttaattgatttattcattggcgtagtttggggaagcatctctggataccgcggcggccgtacggatgaaacaatgatgcgtgttgcggatatcttatatggtgttccttaccttttactcgttattattttaatggttatgcttggccaagggttaggcacgatgattttggcgatgaccattaccggctggattaacatggcccgtattgtacgtggacaagtattgcagttgaaaaaccaagagtacgtaatggcttcacaaacattaggagcaacaacaaaacgtattttatttaaacatcttattcctaatgcgacaggtccaattttagtaacaatgacactaacgattccttcagcaatctttacagaagcatttttaagctacttgggactaggcgttccggcaccgcttgcaagttggggaacaatggcttcagaaggcttacctgctttggaatactatccttggcgcttatttttcccaggtttgtttatctgtttaacaatcttagcgttcaacgtaattggtgatggattacgagatgcgttagatccaaaactacgtaagtaaggaagtggactcatatgtcacgtttattagaagtaaagaatttagctgtatcatttaaaacatatggcggagaagttcaagctgttcgcggcgttaacttccatttaaataaaggtgaaactttagcaattgttggtgagtcaggatctggtaaaagtgtaacttcacaaacgatcatgcgccttattccgatgcctcctggccgaatcaaaagcggtgaaatgctgtttgacggcattgatttagctaagaaaacggataaagaaatggaagctattcgcggtaaagatatcggtatgatcttccaagatccgatgacttccttgaatccaacgatgaaagttggggctcaaattggtgaagtcgtaattaagcattccaaagtgtctaaagcagaagcgaaaaaacgggcagtcgagttattaacgcttgtaggaattccttttccagaacagcgtgtgaatcaatatccgcatgaattcagcggcgggatgagacagcgtgttgtcattgcgatggctcttgcttctaatccgaagctattgatcgctgatgaaccaacaacggcgcttgatgtaacaattcaagcccaaattttagagttgatgaaagacattcagaaaaaaacggatacctctattatctttattacccatgatcttggtgtagtagcaaatgtagcagatcgagtagccgttatgtacgctggtcaaattgttgaaatgggcacagtggatgaagtgttttacgatccaaaacatccgtatacgtggggactgctagcttctatgccaagcttagacaacgaggcagaagaagagctggctgctattcctggaacgccgccagatttaacgaatcctccaaaaggagatgcatttgcagcgcgaaatccatacgcaatgaaaattgattttgagcaagaacctccaatgttcaaaatatctgatacgcactatgcgaaaacatggctgttacatcccgatgcaccaaaagtagagccgcctgcttcagttcagcgccgcatgcgtaaagttgataatgtatacagtacacctgtactcgtagcgaaggatggtgaataacatgacagataaattattagagattaaagacttaaagcaacattttttcacaagtaaaggaacaattaaagcagttgatggtctgacgtttgacatcttccgcggagaaacattagggcttgtaggtgaatccggttgcggaaagtcaacgacaggcagaacgattattcgtttatatgacgctactagcggtgaggtactatttaatggcgaaaatgtacatggtcgcaaatcacgctcagcgcttaaaaaattcaatcgtaaaatgcaaatgattttccaagatccatatgcgtcgcttaaccctcgtatgaccgtagcagatatcatagcagaaggcattgatattcacggtttagctaagacgagaaaggagcgtatggcaaaggttcacgagcttcttgaaacagtggggcttaacaaagaacatgcaaatcgctatccacatgagtttagtggcggccagcgtcagcgtatcggtatcgcaagagcactggcagtagaacctgattttatcatcgcagatgaaccaatctcagctttggacgtgtctatacaagctcaagttgttaacttaatgaagaagttacagcgtgaacgtggactaacatatttatttatcgcccatgatttgtcaatggtaaaatacatcagtgaccgcatcggcgttatgtacagaggtaagattgtagagcttgcaccaagtgatgaactttatcgaaaccctgttcatccatatacaaaagcgttactttcagctattccgcttcccgatcctgacagtgaaaaaacgcgtcagcgcaaaatttatgatccaagtatccatgactataacggtgaagaaccggagcttagagaagtatctccaggtcactacgtgtcttgttctcaagcagagtttgccacatatacaacataacaaaaacgatctcacaacgaggtcgttttttatttagttatcaaagaacactaagcttcaagttgcaaaaaacatgtaagaacaagtaacattagcgctttacaggtattatacagtaaaggattgaaaaatactattgaaaattttcagaattttatatttaagacaaaatatctatgtataaatcttataactaaaggaatataagtgattaataatgttttgtattgaataataattcaagatttataaaaagaaggtagacatgcgtctaccttctttttataaatctgctaagatatcgccgtctttacgatttttgtcaatttttaatacttgatctgccggctgataagacgcaccatatatttctttgtctttgtacgtatgaattaactcgtacgtttttttcattttatttaaaatgctttcctctgtttcagaggtaggagaccaatatagaatttccatctggttaatttcatttgtagctaatgaccggcggttatagccaattgtttgagcatgcttaaagtctgcacgtttataaaaatgcagtcgttttgctgagtctgaatctttatagtctacaggctctacttctaagataattggtttgttatgctgttttaactcatcaattaatttacctccaagcccttgacctcgagcatcttttgaaacaaagaggtaatcaataaagataaattggtctgtttccacgtacattaatacgtgatgaggtccttcgtttttatgataaatatcgctgcgttcttgtaaaagcgtttcgatatgcttctttgatttcatttcttcaatgggaaaatattgacttagtttttcataccaattcatagcaccctcctactgatcttttcatgatgatgttcataatagtgtttaaacagttatcttatctttaccctttttagggaaaagtaagcatctataattgaaaatattaagaataatcgatcgattattcttaatatttagataactatagcagaataagaacatataatgtaaaaaatggtttttattatatttcacccgtaagtttatttgtgaaaatcacaaaaaactatcgcattttttgtgatttttgataaaatgaacaaagtgaagtttttttaatattgtattttatagatgtgagagcggtaaaagtataggtgtgaaacttgcaatatcagatttttagtacatacactgcctagaattatttggctgaaaaataagttaatactatacacgtagccgctatcgctattaaatgaaatggatatgttaggagagagaattatgcaagggaacacgcaagaaaaagaattaagccgtggacttgaggaaagacatattagcttaatgtctttaggtgcagctatcggagttggactgtttttaggttctgcatccgctattcggttagcgggtcctggtattcttatcatgtatggaatcagtggtcttattatgttttttattatgagagcgctaggtgaaatggcagtacaaaatccagtagccggttcttttagtaagtatgctaacgattatttagggccacttgctggttatttaacaggctggaactactggtttatgtggattattacatgtatggctgaaattacagctgttggagtatatatggagttttggttcccaggtgtacctcagtggatatgggcacttgcagcactcgttatcatgacaggggttaactttttagctgtaaaagcatatggcgaactagagttttggttttctcttattaaagtagtaacgattatccttatgattgtgttgggcctaggcatgattatctttggaattggaaatggcggtattgcaacaggaatcagtaatttatggagtcacgggggctttttcccgaatggcatgaaaggcgttcttttatcacttcaaatggttatgtttgcttaccttggtattgaaatgattggggtaacagcaggagaggtgaaaaatccggaaaaaacactaacaaaagcaattgataatgtactgtggagaattttgattttttacatcggagctttgtttgttattatgtctatttatccttggccagagattggaacgcaaggaagtccatttgttttaacttttgataaagctggaattcccgctgcagcagggattataaactttgtagtgttaacagcggctttatcttcttgtaacagtggaatttttagtacaggccgtatgttatttaatttagctcagcacggggaagctccaaaacgctatgctaacttaacaaaaggcggcgtgcctggtgcagcagttattgcttcagctgttgtactgctaatcggagttggcttaaactatgttgttcctgataaggtgttcacctgggtgacgagtattgccactattggagcaatttggacatggggaattattttactttctcaaattcgcttccgcaagggattaaacgatcagcaagtaagtaatttaaaatataagcttccatttttcccgtatacgtcatatctctctcttgctttcttagcgggagtagtagtggtgatgggtttttcctctgatacaagaatagcccttattgtaggtccggtatggtttgttttattggttgttgtctactattcaaaaggttttcataaaagataaaaaataaagctcggacaaaagtagtttcgttgaagaaagatccgaacgagttgaattcttaatcaagaattcaactcgttcggatttttttatggtgaacataggtttactgtatgtagggcttctagctattgaactggagggcaaggggaagactctccacagcggtgtaacaagcgggatccatacgaactcatatatcccatttattcatctttagattgatgtagttgtgtcccagccgcatttttttccaaaagaaaatgaaggatttattatttaactttttgctttagtgtgctaatatattatattgttaaacaaatgaagagatgaataaagaaacaaataatttttacgtgttaatagattagcatcgagctttctatctcaaaagtttaagcttttagaaagcaaaaggagacacagcaaatgaaagataaaaaatggggactttggtttttaacagcctttgtagttggtaatatggtaggcggcggagtatttatgcttccttctaatttagcaaacgtatcaagtccagtcggttcaacacttgcttggattgcaacaggtcttggcgtgttcatgattgctcttgtattcgggaatttagtcatgagaaagcccgaattaaaaggagggcctcaaagttatgcggcgaatcttttttcatcgcctaaagcaggtaaagtagcagggtatagcatggcttggggctattgggcagctaactgggctgcaacagcatctgtcatcatatcgtttgcgggatatttaacaacgttctttccagtaatggagagtaaggatattttattttcagtcggaaattttcaattagaagctggaaaattcattacgtttttagtatgttctattgtcctatggggaattcaagctattttgcagcgagatattaatagtgccggtaatattaactttatcacaacggcagctaaaattattggattcggtttatttattgttgtggcgctatcgctatttagcgcatccaacctggtcagtacagaatttgttaattcaaaaggtataaatgtaggattgggaagtcaggtcaatggggcagccattgctacgctgtgggcctttatcggaattgaatcggctgtactgttatctaaccgtgcaaaatcacaaaaagtagtgaagaaagcaacgctgcttggattattgatctcaatggttatctatgtggggattacgcttctagctatggggattctttcaacagctcagcttcagcagtctcaaaaacctttggtagatacgttagaaatggtgattggacataaaggtgcttacgtaatggccattttagcacttatttctttattaggttctactgttggatggattgttgttagtgcagaagttccttatcaagcagcgaaatcagggttgtttccacagtggtttgctaaaacaaatcagaacaatagtccagcccgctcactaacattaacaaatggcttaacacagttgtttttgtttgcgactatttcaggtacagtttcgcaagcctataatttcgccattgttgtagctactctcgcttatttagttccttatttcgtgacgacagtttatcaattaaagcttattgtgacgggtgagacgtacgacacgattaaaggatcgcgagtaaaagacggaatcattgcctcgttagcacttatttattcactttgggtgattaagacagggacagctgatttaaaaacatttttcttaggtattggcttatttgtaatcgggctgttactgtatcctatcttaatgagacgaggaaaaagcacatcagctattaaataaataagaggttatttcaaaagctttgcagaatgtcagttcttctgcaaggcttttttagtgactgaaaaatttgaagaatttgtaaaagaaaaaaataataaaaaaaatgaaactaatctacaggtttattcgtaatagtagtgtggtaaataaataatgaagaaaatcggcaatgaaaatgatgacagtgaaggaacgaactaatgtactagttcacttcaaaaagtatatcattccgatgaagtttatagtataatgcaaatagatattattttttaaaagtaattataaagtagtatcgattttcattatcagtcattaaatatttacactcgttgaagtttgtataaaacaacatgatttacagttcatgttttaaatgttatgaccgattatgatagaaggagtgaaggagtaaatggttacattatatacatcaccaagttgtacatcttgtcgtaaagcgaaagcttggttagaggaaaatgatattggatatacagagcgtaatatcttttcagagccgttatcaatcgacgagattaaagaaattttacgtatgacagaagatggaacagatgaaatcatttcaacacgttcgaaaactttccaaaaactagacgttcaggtagacgctatgcctttgcaagatttgtatgaattaattcagcaaaatcctggcttgttgcgccgtccgattatcattgatgaaaaacgtctacaagttggttacaatgaagacgagatccgtcgtttcttaccacgtaaagtgcgtactttccaacttcgcgaagctcaaagacttgtgaatggttaatttttatatttgtctgtttaagatttaaataagaaaccaaccaagtaacgtttgcttgaagttggtatataaaaaataagcagcagggagccagatggcctctgctgcttattttttgtcgaaatagcagggaaaatgaagtatatatgtaattaataaagaaagagagtatctaaacatataaaagtggtggtgaacggattggagcttttacagctaaaatatttccaagtagttgctagactagaacatataagtaaagcggccgaagagctatacgtatctcagcctgcgctcagcaaaacgatttcacagttagaaaaagagctaggcattcgtttgtttgatcgaaacggtaaatacattaaattaaatcgatacggtaaagcattctatgccaaagtagaacttgctttaaaaacattggaacatgcaaagcacgagctaaaggatatgtcgaacgatccttgtgaagaaattcgccttgttgtattagctagttcacatttgcttccagagctattaagcaggtttcgtgaacaatatcctcaggtgcgttttcgactgatgcagcatttgactaatagcaattcacagcctgattttgatttatgcatttcagcttttccattaacaacccgtcagatcgaacatactcctttacttcgtgaatcgattttgcttgcagtgcctcttgatcatcctttagccaagcaatcatgtgtaaagttaaatgaacttaaaaatgagaaattcattgtgctgaagaaagggaaagagctaaggaaaataacggatgtaatttgtaaggaacagaattttgtacctcaaattacgtttgaaagcgatgatccagcaacagtaagaggtttgattagagcgaagcaaggaataggttttattcctgaagtaacttggggaggttctacaggaaaagatgtaaaactgctgaaaattgaagaggaaacatttgaacgtactatctttctagcttggaacaatggaggctatgtgacggatttacaacaaatcttcaggcagtttgtgattgattattttaaacatctacgctccggtatgtctcatgaatacatataagaatcatgactaaatgtcatgatttttatttctttttcgaataaatctaaagtgaacagtagagaaaaactgtattatgtcatttttgatataagtatataactaaaaatgcataggttattcaacttttttcctttacactatttttaaatcataaagtaaacgctttcaataatgaggtggggaggaagtaatatgataatcttcggtgtagcgctgctgtctatttgcatgttgataggggtaattgttggggacgcattaggagggctgatgggagtagaagccaacgttggaggagtaggggtatccatgcttcttcttgtactagcggtggattatttaaagaagaaaaataagctccaagtaaaatccgaagaaggcattgctttttggggaggtatttatattcctatcgtggtagcaatgtctgcacagcaaaatgttgtagctgctcttgatggaggaggcatggcgcttcttgcaggggtagtagtagtcgtagtaggctttttatccataccatttatcagcagaataggagagaaagcgaaggtgaaagaacaagaaatagagctttctattttacctaaggagcagataaaatgatgaatatgattaaagaaggattagaaaataacgggctgattacggcatttgctattattgggattgtcatgtatattgcttattttttatcagataaattaacaaaaggaagagttcatggatctgctattgctattatgtttgggttaatccttgcttatatcggtggagtgaatacaggaggagagaaaggaatttctgatatacagttattttcaggaattggtttaatgggcggagggatgctgcgagactttgccattattgctactgcgttcggcgccagttttagcgaagtcaaaaaaacgggaatcagcgggattacggccttgttttttggggttttctattcctttgtaataggtgtaattattgctctttgttttggatatagagatcccgttgctttgaccacaatcggaggaggagccgtaacctatattgtggggccggtttctggaactgcgattggagcctcttctgatattatcgcgttaagtatagctgtaggattaattaaatccatttcagttatgattttgacaccgatatttgctaagaaaatcaaattaaacaaccctcgtacagcaatgatctatggaggagttatggggacgacgagcggtgtagcagctggtttagccgcgacagatgtaaaacttgtaccttacggagccatgacagctacattttatacaggtcttggttgcttgctcgtaccatctattctttttttactcacagagattattttttaagtgtacaaagtgttttatgaataaaagactgctgtgctcattaaactaaagaaaaggccatactaaataaaaatgtttagtatggccttttctttatcgtttaattgaacgaaagctattaacaaccatgccgcttatcagcacaacagcaattgttatatacggaataaatgttcctagagatgtatgggctgcaaagaatgaatgtaagttcttttcatgtccaatcatatttccagcagtataagctaaaatagctgctcccccataaacgagcaggggaaatcgttccatcaaatacaaaatgagcttgcttccccaaacaataatggggacggatacgagtaatccgataacaaccaagataatatttccatgagctgcgcctgctacagctattacattatctagtcccattacaatatcagcaaatacaatcgttcttacagcggcgcctaatgtcacgcctgcacggattgaagatgcatcatcaccttctgatacaagaagcttaaaggcaatgatcactaataaaaaaccgccgatgagctgcaagtaaggaatagttagtaaataaacagctaaaatagtaagtacaatgcgaacgatcacagctaagccagtccctaaaaaaatagctttgtttcgctgatattcaggtaagttgcggcttgctaaggcaataacaatagcgttgtctccacctaatacaatatcgataccgataataagaagaatggaggttattaattctaaatccaatagtcttccctcccaatatgtaaggataagtagctcatattgctttatctgtgttcatttttaacaaaaagcgttcatagggtaaagagattatgtatataacaaagtaaggtgtaaggtggctatgagttgccagagtatttttcatttcctttctttcgcattttgtcataaaatagatatacaaggttcactcaaatagtgtatgcttgtatatcccaagttagaatgctttacaaagtgagaaagtacatgtaatattgctttaacacgggggtaaaatagtcccttcatcgtttaggggtaatgttcgaaatggccggattaccttcactgatttttccgaagggagagatgataatggaaatcgaacgcattaatgaaaacacagtaaaattctttgtcacttacgtagatattgaagaacgtggatttgatcgcaatgaaatttggtttagccgagagcgcagtgaagagctattctgggagatgatggacgaaattcatcaagaagaagagtttgtagcagaaggtcctctttggattcaagtacatgcgcttgagaaggggctagaggttattgtaacaagagcacaagtttcaaaagacggtcaaaagttcgaagtacctgttggtgaaaatgataaaatcgatatccctgtagatggaaaaattgaagcgttgcttgatcatcaagcgaatcaaaataaaaaagctgattttgaagaagaaattatagaagacgaagggctacagttcgtcgcacgctttcaagacttagaacatttaatttccttaagtcaccatttagagttagatgatatcatcaacagcatgtacgtgtttgaaggaaaatattatttatacgttgagtttacagatgatgaagactttgtagctgaaattgataacattttaagtatcattttagaatatgcaaatgaatcaaatgtaacagttcatcgtttaatggaatatggaaaagaattaatcagtgaaaatgcacttgaacaagtaaagcagtattttcctttacgataatagcagccgatttcatgtatatgaaatcggtctttgttttgtcttcattttgggaaaagctctccgctcatatcgaacaatttaggtggaaaaagcaggcggctggttcctacacgggaaagtgtagtgttaaaataacaagtttgaggataataacggtatagagacctgttattaatgatgaaagattggttttaggataggtgaaaacaagttgaaaaatagattacagcttttaatttttgttattggtattattgctttgctttattttacaaaagggtattgggacggtaaatttattggcgtgctaagtatcttaattacgattagtgttgttttcatcggtcttgttatttcattagaaaaccgtcatccaactcaaacgctaacgtggctcgtagtattaggcggtttcccggtaatagggttctttttttatttgttatttggacgcaatacgcgaaaacggcgtttatttgctaaaaaagcaaagctggatgaacaggtgcttttaaagatggaaagagattccggtatattagaaaatcactttgaacagttgggcaccagtagaaagcaaatgctgaagctagccgtcaggcttggcaagagtccaatttctttttcatcagatacgcgcgcattgacgaatggaaaagagacgtttcacgaaattatggaatcattaaagcatgcaaggcatcatatccacttagagtattacatcgtacgacatgatcacttaggagaacaaattaaagatattttaattcagaaggtacaagaaggagtttatgtacgtttcttgtacgatgccgtgggcagttttcagctttcaccgcattatattcacgagttaagaaacgcgggcgtagaaatgattccattcttgccggtcagatttccatttctcaataataaaatcaacttccgtaatcatcgtaaaattgtagtcattgatggaacaattggatttgtaggaggtttgaacattggtgatgaatatcttgggaaaagtcggcattttggcttttggagagatacccatttgatggtgaagggtgaggcagtccgttcattgcagcttattttcttgcaagactggtattatatgacaggtcagacgatgcttactcaaacgtatctatcgccggatttaattgacattgatatggaaaagtgcggcggtgttcaaatgattgccggcggaccagaccgtgagtgggaaattatcaaacacttatttttttcgatgattacgtctgcgaaagagtccatttggattgcctctccttacttcatacctgatgaagatatttttacttctctcaaagtagctgctctaagcggtatagatgtaaggcttcttgtacctcagaagcctgataaaaaaattgtttttcatgcatcacgctcttattttccagagctgctagaagcaggtgtgaaaatttacgagtataaaaaaggatttatgcacagcaagattgtgattgttgatagagaaattgcctctattggaacggctaacatggacatgagaagctttcatttgaattttgaagtaaatgcttttttatatcgcacagctagtactcaaaagctcgtatatgaatatatgcaagatttagaagaaacgagtgagcttcactttaaagactttgaaaagcggccatttatacagcggctatttgaatcaacagcccgtttgctttcaccgctattataatcgctgtaaaccacattgcgtacggtgcaatgtggtttttttctgaaagaaaagggtttagtagaaaggtgtcgaatacaagaatatagctcgctattataggaaggagaaatgtacgattgttagttgcccaaacagaagaaggcctcatttcactagctcagcgcttttcgcttgaacagcttaagctgtggaaaaaagaaaagcagttctactgtccctcttgtcaatcccctgtacagttaaaggtaggtacaaaaaaaattcctcattttgcgcacctgaaaaaaacgtgcgtcgctcagcatgaaggtgaaacagattatcatctcgacggaaaacgaaagctgtttcactggtttagttctcatcttgaagtcgagttagaaagttatcttcctgacattatgcagcgtccagatcttcttgtagatacgccctcgcaaaaatatgcaatcgaatttcaatgtgctaccttatcttcctcagcgctaactaaacgttctattcattatgagaaaggaaattatatgcccctttggattatgggggcaaaaagaatgaagcgcttatccacttatatgtatcaactttcttttcaagagtggcagtttcttactctttccgattatacgcccacacttctttatttttcaccttctactaatcaactgttgaaacttgaacatcttattcctttttcatctcagatttgttatgcacagcttgtcgtgctctctcctcacgagcatacctttcatgatcttttttctacacatacacaacctcaatttttctcttcgtggataaagaaaaagaaggcatggagaacgcattatatcctctatcctaatcagaagcttcagccttttttacacgctctttatgaaaataatattcctccctcccatattccagcagaagcaggcatgccgctgccttctttatacatggttgaaacgtctgctattatatggcagacgtggctgcttctcgatttaatgcagcagaagcaagtaggggatttagttacagaaaaagagttaggccggctatggctctacagaattcataagcggcatattgtatttcggtctttgccaatggcccctgtcgctgtggaacagcccctgtttgagtatatagaggtattatgccggctaggaatgctaacgtatataacttctggggtatacaaaatcagaaggccctacacgattccaaagcaaacatctgatgcttttttagaagatggacaaatgatgaaaaggtggttaaatcaagcaaaagaagtgacataatcacggaaaatcagtacgcttaagaaagaatccttttttcaaaagcgtactgacttttgattaattcttttaaaacaacatacaataacgagagaaataaaaaggattcgccttagaaaaagcgaacagttatagacaggtagaaaaagatggagggatgaccatgagtgaacaatcaaaagtaaaaaagttaccaagtagaagcgagataaaagtagaagatacgtggaaactagaggatatttttgcttcagatgacgcatgggaaaaagaatttgaagaagtaaaagctcttattccgcaaatggaaaaattcaaagggaaacttggagagtccgctcaaactttatacgacgctcttcaagagcaagacgagctcacaatgcgcgttagtaaactttatacatatgctcatatgcgctacgatcaagataccactaactctttttatcaagggttaaatgatcgaatcaaaacactttatacccaaattgcaagtgcactatcgtatgtaacaccagaaattttgtctattgaagaatcaaaaattaaacaatacatggcggaacataaagagctaaagttatatgctcatgcattagatgaaattactcgcgagcgtccgcacattttatcagaaagcgaagaagcgcttcttgctcaggcttctgaagtgctaggatcttcaagcaacacgtttggaatgctaaacaacgcagatttagaattcccctccattaaagatgaaaatggagaagaagtagaaattacgcacgggcgctatattcgtttcctagagagcagcgatcgccgcgtacgagaagaagcgtttaaagcggtgtacgaaacgtacggtaaatttaaaaatacgtttgcaagtacgttaagcggcacggtgaagaaagataattttagcgcccgcgttcgtcactataattcagctcgtcactcagctcttagcacaaataacatcccagaagaagtatacgataacttagttaaaacagtgaacgataatttgcatttattgcatcgatatattgatttacgtaagaaagtattgggaattgaagagcttcatatgtatgatctctatacgcctttagtaaaagacgtaaaaatggaagtaacctatgaagaagcaaaagattatattttaaaaggcctgaaaccactaggtgaagactaccttaacgtgttaaaagaaggatttgaaaaccgttgggtagacgttcatgagaacaaaggcaagcgaagcggtgcttattcttcaggaacgtatggcaccaatccttatatcttaatgaactggcaggataatgtaaataacttgtttacactagcccatgaatttggccattctgtacacagttattacacaagaaaaacgcagccatatccttacggagattattcaatctttgtggcagaagtagcttcaacgtgtaatgaagcgcttctaaacgattatttactaaaaacgattgatgatgaaaagcagcgcttgtacttgcttaaccattatctagaaggattccgcggtacggtattccgtcaaacaatgtttgctgaatttgagcacgatgtgcacgtgcgtgctcaaaacggagagccgcttacacctgaattattaacaaaattatattatgacttaaataaaaagtattttggagacaacttagtgattgatgaagagattggattagaatgggctcgtattccgcatttctactacaattactacgtttatcaatatgctacagggttcagtgcagcagcagcattaagcaagcaaatccttgaagaaggaaatgcagctgttgagcgctatgtaggtttcttaaagtcaggaagctctgattatccaattgaagtgttgaaaaaagcaggagtagacatgacaacatctcagcctattgaagaagcgctagccgtatttgaagagaaattaacggaaatggaacgtttattaaatcaataaaattaaaatgaagcaggagctgtatcctgcttcattttttaaatcctcgaaacttgttgtgattgttaagcaatgtaaaaataataaggatagctaaaaataagagagggcctgcgataatgagagggacaagttgcataagagataaaatatagaataaaaaagaaaccaaaagaataacaacccctagagtaattccagcaattttcatagttaacacctctattaaaagcataattggttgtactatatgagtgaatctggctgtttatgaagtttttttataaaaaagtgaataaaattgaaaaaaggggttgccaaaagtcgacataatttgctatagtattaatcgtgaagtttatcacaaaacaaacatatacccctttgtttgaccgtgaaaaatttctcccatccccttgttgtcttaagacaaacgaaaagacttggcgaaagccaagtcttttttgtttagttgatgcttagcagctcttttcagtacttctccaaaaggtgccgtatttgacaggaactctctcaaccacttgctgaagctgaagttttttcaattccttttcagcctcttctaatgataaaccatacacaactgcaacttcttttgaagcaacaaattgaaaatagcttaaaaatgaacgaagaggcggaagacaagctggatctgggtcaatttctaacatctctttaatgatgtgtacatatgtttcgtacgaatagtatcctgatatcttaatgccttcttcttcaactttttcgttgaagaacacaagagttggaatctcatcgacatccatttccgacgtgatttttaaatcacattgaaaggccttcgcagcataatctgaatgcaaatcttttacaaattcatcaacatctagccccacatgttttgcacattgtattaagacagattcttctgtaacattttgtttttctaaaaatactacttcttgaagtcttctcaaaaagcgaatgccctgtttctttccttgcagaccggccgctttaatcgcaattgatgcagcgtaaggagtatcgattgggttttcaagccacagattgccgtcacatgacataccggagcggcttccagttttctcccacgattttgcaatatgttcaaatttctgctgtgctccaatatttaattgctgtaagtttccgccaagcacatgcttgagggataacagctgaccatattctatttgtaacttctttagaataggctcgagtgcccagcattccgggcaaagagggtcaacaaatacatagatttcaagcggttttttatttgaaccttgacaaagctgatgcaaggatgggaattggctatttagattactcaatgtgaaaatcctttctcatctgtctgttccggtgaattaatcatgtgttgggcagttaaaataagacgatgataaagttcatctctctcagggccttctaaattaatttcgtccattgcttcatgcatacacgtcagccaggctttggctcttgacggtgtaatttcaaaaggaagatgcctagctctcagcatagggtgaccatgctcttcagtgtataacgaaggtcctcctaaatattgtgtcagaaattgcttttgctttcgtgctgtttctgttaaatcatcaggaaaaattggcgcgagctcaggatgttttccaacgcgtgtataaaaagcatcaacaagttttgaaatcgtatgttcaccgcctaataattcgtaaggggagtggattttttctctcatgttgataactcctttgttataagaaatatacgtcttaactctttggtgttttttactttccttaattttagcagtgtcatttcgttaactcaaactatccgcttacttcttctactggaaaagagataaagtggaattttacataagaaaagtctatgatgctgtggcgaatcactaattatgagaaacaaaggaatactttcacaaacgtttccttctatttatatagtgtaacctcgacaaactacagccattctatgttcgagtggtgaatgatttggctcatttaaacaagataagaagacataattttatttacatatttttgcgtttcttgaaaaggggggactccgccgtatttatcaacattacctggtccagcattataggccgccaatgctaatttcacgtttccgttgtatttatctaacatttgtcgaagatatttggctcctccaaatacattttgcttggagtcatacggatcttctacaccaagagctttagcagttgctggcattagctgcataagcccagccgctcctacagaacttttggcagatggattaaagtttgattcttgtttaataacagaacgaataagtttaggatccagctggtagcgtgcagctgcttctgtaattatcgtttgtacatcctgagaactggcctttgccgtttcatttttttgtgcaggtaaggcagaatttgaagccgctgccttacctgaggaagaaacagatggcttggactgcatttgaaccgccgtagatggaaacatctgcgctgccttcaagtaaagattggtactcatttgaggctcttgattgacgtagtcttgaaaaagctgagcaaatacagagagtaaagttgtaccaagcatcacgttagctgttggcatctggttgttaactgaaaatggctgagttccaggaaattgaacggaagacatgtaattgttaatattcatgctcatgaatttattctccatctattaacgtatactttcgcttgtaaaaccgtcgaattttgttttccgttggtttctttttaatatcaagctccgtaagcaattgctcaaaatattttgctccttcattggcatcggttacttcgtattcaagttcataatcttcagcacctagataaaagctatgatcgagtacaagtaacccgtttttatatggaatttctgctcgacttgtacacaaagtgccaaaataagttagcgcatggctatcgacttgtaaatcagtaataagctgttgaattgttgacggaatcttggcgctgccatctcgcaattctttagcttgttcatttgttaatgcttcatgtgtttctaaaagaccctcttgatgaggctgtttgagcgtgagcacggacttatcttttttgcttcgaattcgcagggcagccccgcagtcttttaatgagaaagcaggtgtatcaaaatagtggttttcttgagagacaaactgatcttcagttagttgaaagtgtgagcggagacgatcgaactcttctttcgttactatatttttaaattcaatttcaatttcttgtttcaatgaaatcatccttttaatttaggtcttttggtaaggcactttccatcttaatttatcacactttttgagacagtcaaactacatttcctaacaggaatatccatatggagaacttgggaaatgaagaaatacggattgtttaggttttacctttattaaacgttcctggaatgtgttaaaatagtaacgaattgtatagttggaaggagtttatttatgcacaatcgaattgacatcactacctgtgtgatgaaatcaaatgaattacatttaaaagcagaccctattgagacggaaattgaacaattggaagatacaaaacaaatgcttgttgactcagataacatgtcatttgtatatgttgtagatattaatgatcaatttatgtatgttggccttagtgataatatttgggcaaatttaaagcacgtcttacataaagatatgaaagtatttttagaaattaataagaaaataattgagctatcagccgttaaagaagagctatcttatctcatcagtaacatcgaaggaaatgtgaattatggagacgagatggtagcaagggtagaggaagtttttttagataaagaaaataagtaatagagagaaaaaaggggggtgttattaatgatcaggcattgggatttatttttagcaccgtataaacaagccgttgaagaacttaaggtgaaattaaaaggaattcgttcacaatatgatatgaaatctacgcattcacctattgaatttgttacgggacgagtaaagcctatcgccagtattttggataaagcgactcgaaaaggaatttctctcgatcgcttagaggaagagatgcaggacattgcgggactccgtatgatgtgtcaatttacggacgatattaaggcggtcgtagagcttcttcgtcagcgaacagactttgaattgattgaagaaagagattatattcttcataaaaaagaaagcggctatcgttcatatcatgtggtcgtatgttatcctgttcaaacaattaaaggtgaaaagaaaattttagtggaaattcaaattcgtacactggctatgaatttttgggctacaattgagcattctttaaattataagtacagcgggaaatttcctgagaacatcaaaaagcgacttcagcgtgcttctgaagcagctactcagctcgatgaagaaatgtctcaaatacgaggtgagattcaagaagctcaggctattttctcacgaaaaaaagaatcggcggaagaatcttaggtatgactcagcaacagctttgtacattggatggatagggggagagaattaggtggagaaaataaaatttgctattacatcaaaaggcaaccaaatatcaaatacgcttatgcaaaaaatgaaaacgtatttattagattttcatttagaatatgatgaaaaccagcctgatattgtagtgtcagtaggaggggatggaacgcttctctacgcgtttcaccgctatcgaaaccgacttgacaagacggcttttattggggttcataccggccatttaggcttttacgcagattggacacctgatgagattgagaagctggtgattgctattgcaaagacaccctatcagactgtagagtatccactgcttgaagtgattattcgctacaccaacggtggacgcgaagctcgatacttagctctgaatgaatgtacggtaaaaagtgtagaaggttctttagtaatggatgtggaaattaaagggcagcgatttgagacattccgaggagacggcctttgcgtatccactccctcgggaagtacagcttacaataaatcccttggaggcgcgattttacatccttcgcttcaagctattcaaattgctgaaatggcttctattaacaatcgagtgttccgtacgataggttctccattggttcttcctggacatcatacagcgctgttaaagcctgtcaacgacgcagactttcaaatcaccattgatcatttaactcttttacataaagatgtaaagtcgattcaatttcgggtagcaagcgaaaaaattcgatttgctcgctttcgtgcgtttcctttctggcagcgtgtcagagactcttttgtatgtgatgattaaaggcagggaagagaatgaaacaagtttttacgttgagttggaccgtagatcattctttcgagggtgtagcggttcgtgaatttttaaaagaacatgatatttccaaagcttctctgacggacattaagttcagaggaggagcaattgaagtaaatggaaagcatgcaacggttcgatatattctgcaaaaaggtgacgaaattaaggtggcgtttccaccagaaaaagcaagtgaaagtcttcttcctaaagctatacctttggatattgtatacgaagatgagtatatattagtgttgaataagcagccaaacatgccaagtataccttctcgagaacatctaacgtggtcactaagtaatgctgtgctctattattatgagaaaaataacattaactcgactgttcatcttgtaaataggttggaccgagacacatctgggctgcttattgtcgctaagcataggcacgttcattacttattctctaaagcacaaaaagaacatgaaattaaacgcgtgtaccgagcttttgttcatgggaagcttgttggcaaagaaacgatagaggcaccgattggccgaaaagagtcaagtatcatcgaacgggaagtaagagaagatgggcagtttgctattacacactatacggcgcttcgtcagtattcttcttttacagaagttgctctttcgcttgagacggggagaactcaccaaattcgtgttcatatggcttataaaggatatccactgcttggagataccttatatggaggaacgaatcatcttatttctcgtcaagctcttcacagctatgagctcactttttttcatccttttttacaaaaaactttgtcttttacagcacctttgccgccagatatgcagaaacttcaaatcgtaaaagaaagtcgctttttttaatgaaaagcgactttctttttacacgaagtgattaaatttttcctctacgtaaggcatagatgaaggcaccgatataatattcctttcaggatactgaaacgccgttaaagcccctccaaaaactgcgcctgtatcaatattaatggtattatgaatttttctggcttttactacgggtgtatgcccatacacgataaacggttttccgttataatgtttggcccaatcccgtcggacaggcatgccgtttagatgtttttcacccgtaatgtctccgtatagcacaaaggtttttacttttttatccgttctgccgatgtattcagctttaagaccggcgtgagcaataattaattggttttgatcaagctgcacatatagaggtgattgttcataaagctcaatgaacttttttttaatgaatttctgttctcttgaaggtaaagcttcgtactcggcaacggtcgtttctaatccatgagtaatttgcactttgttaccgcaaaagaagcgatatagcttattgcagtgattgcctggacagtagtaagcttgctgatgctttattacaagtgaccatacgagctcaatcacttttagtgaatgaggtcctcggtctgttaaatcacctacaaatccaaggcgccttccgtcacagtggacaggaatcccgtcttgccactcatacccaagtttttctgttaacgcttttaattcatcatagcacccatggatatcgcctattatatctactttcatcttttatccacatccttaaaaggtttttcctttgacgatataaaattacccttatatggagcaaactatgtgtagaacttatatattattgggaaaagagtaaagagctaggagttgaaaaaaaacaaaattcatcataaagttaaatgagttttgtgcgacagggaggttgaagacatgacagattcaattgaaaaagaagaaaaggcatggttcgccgaacatttattatcacttttagaaaaaaatgaaatcgatgcatttcgtgaagaatttttacatatgcatacgtatgaccaagctcaattttttgaagaattagatgagccttctagatttgcgctgtacgagatgttatctccggaagaaatggcggatatctttgaaaatgtagagatacgagaagaagattatcaagaaattctctcagagatgcatcccaattttgcagcagacatgctgtcgaaaatgtcggcggatgatgccgttgacgtattaaatgaattggataaagaacaagtggcgagctatttaacgattatggatgaagaagcagccgatgaaattaaagagctgcttcattacgaggaatataccgctggaagtattatgacgactgaatttgtggccattcgtgaaaatcaaaccgtacattcagccatgcacattctacgcagggaagctccagaagcggaaacaatttattatgtatttgttattgatgaacaaaagcatctagcaggtgttatttctcttcgtgatttaattatagcagatgaagatacgatgataagcgaagttatgaatgaacgagtcgtatccgtatcagtagcggaagaccaagaagaagttgcgcgtattatgcgcgattacaactttcttgcgcttccagttgttgattttcagcagcatcttctcgggattattacggttgatgatgtgatggatgttcttgatgaagaggcatcggatgactattctaaattagccggtattagtgatgtagatgatacgattgaccacaatcctttagtagcggccaaaaagaggctgccttggcttatcattttgctgtttttaggaatgatgacagcgagtttaattggacgttttgaagatacgttgaatcaagtagctattttagctgtatttatacctttgattggcggtatggctggtaatacaggaacacaggcactagccgttgcggttcgcggactagcgacgggagaaatcgaagaagaaagcaaatttaagctgttaatcagagaagcagctaccggaatgattacaggcgcatcatgtggacttttagttgtattaattgtttatatttggcaaggggatcttattttaggcgctttggtaggcgtctctgtattttcaacattgattgtggctacacttgcaggagcgtttatcccgcttctcatgcacaggttcaaaattgaccctgcagtcgcatcaggaccatttattacaacgatcaatgatcttatcagtattttaatttacttcggtctagcgacaacatttatgagttatttaaaataatgaagggacgttagaattcggcatgagtaatcatgtcggattttcagtattagttcatatagttgacagagaaccttcaagcttttatgattaacctttaattttgaatactaacgtcttcgttttataaatagcgaaggtaaaaggagggggatctaatggaacagcacgcgtcctttacatcacttgttatcgtcattagtttggcctttttaacgcctatactgttgcatcggtttaaacttaacattatacctgtagtcgtagctgaaattattatgggattaattatagggaaaagtggttttgaccttgtggagcaggatatgtggcttgaaacactttccactctaggctttatctttttgatgtttttaagtggtttagaaattgatttttctgcttttgctggaggaaattcaaaagataaaaaggcttcaggagcgaaggtgccaaatgctttttccatttctatactagtgtttgcagctatctttgccgtttcactatttttgtcctatgtttttgtatggacaggttttattgataatgcctttttgatgacgcttattatttctaccatttcactaggagtagtagtgccgacattaaaagatgcacagattatgaaaaagccgattggacaaaccattttattgattgcggttattgcggacttagtcacgatgattttactagccgtatttgcttccgtctatgataaatcaggaaatagcaatacgtggttgattttaattttatttggagtaggagtgattttatacttcatagggaagcagtttaaaaaccgatcgtttcttgaaacaatgtctaaaggtacaattcaaatcgacacgcgcgccgtatttgcactcattatcattctggtgggcctttcggagtcaattggtgttgaaaacattttaggcgcgtttttagcgggatcactcgtttctcttctagctcctaacaaaaacttagttcataaattagattcgtttggctatggatttttaattcctatcttttttgtgatggtaggagtgaagcttgatgtttggtcattgttcagtgataaaaaagtgctgatattaatgcctttattattcattgcattgttgatatccaagctagtcccagtgttaatcttaagaaaatggtatgatatgaaaaccgttttggcatcgggttttcttttaacatcgactttatcactcgttattgcggcagcaacggttggtgaaaatattggtgttattgattcacaaatgtccggtgcgctgattttggtggcgattattacatgtattattacacctattatctttagaaagctgtttccaaagccagaaatcagtgacagaaagctgaaggttaatatgctcggggcaaatcaatttacactcccggttattcgagaaatggatcttgatttatatgatgttacgatttatcatcctactcaggacaaaattgaaaaccgtacgtcggattccatttttaatatcgtggacatcgatggatatagtaaggaaactttaatgcgtatggggattttagatgcggatgtattagtcgtaacaacaggggaagaagaaagaaatagcgacattgctctatttgcaaaaaaatatggtacagaacgggttattgcccgcgtagaaagtcctgtattagatgaaaagatgaaagaaaataacattgaagttttttctgtgctgttatctacgactgcattgctaaaagctttaatcgaatcgccaaatattttaaatatcttaacgaatcaagaaacagcactttatcaaattaatatgcgtaaccctaaatacgaggggatagagcttcgtaagttcccatttacaggagatgtgatttttgttcgaatctttagaggcaaagattccattgtacctcatggcgatacagagcttgaatttgatgatcgtttgattgtaacggggtctcgttcatatgtgaatgaattgcgtatgcttcttgagtataaaattagataaaggtatctaggtaggtttagttttctatgttattgaatgagagaaagaggctgggacaaaattattttagctgaagtgaaaaacgaaccattgatcaaaatatttgattagtggttcgtttttttgttgtcttgaaaattagtttcatctgtttagctctctctagcagttgatgggagggcaagacgaagactcctgcgggaaaatcggaacaggggagaccccgcaggagcgcaagcgacaaggaggctcatcggccgcccgcagaaagcgaagtcttgcatggaagtcaactgcggtgtaataagcggttcagctcatgtgtcccatttgtgcgtctttagattgaattaatttcgttatgtctcaacctcttttattgtgttttctcaaatgctggaaataaaagtacagcgctgcttttggtgttaaaaaggctaccgcaaaaaaataaacaagtttttccgtgttcaagcatacatttttaaaagaacgataacaagcaattggaggtatgcttcatgactaactcaaaatctaagtcagaagaaaacgagccgctaatgtacattgtccagccaaacgctacgcaaaatcagcgttctatgcaatattattttagttcaaaacagcaagacaataaaggaatagagaaagagcacgtgttaaaagaagagcccagcttttcttccattcaagaagtcaaagagcctgacgtagaaaaagtggaagagattaagcaagaaaaagaggaagagcgttcaattgttcccgtggatataccgcaatcagagactaaaaagccaaataaaatgtttcagtctatgacgattaaagaaaaagttgattttctatgcagtttcccgcctcatatgtctcagccaatttgtgaaattacgtgtcaaaaccaaaaatatataggaacaattttagaattaaaagaaggaagtttatacgtgagcgttcctcctaataaagagaaaacagtattgacatttcatgatattcagaccatatctatcattaaaatttaagtaactctaaaagctaacagtgaagaagcacgttagcttttattttcataagtttgtgaatgcacggaggaatgaaaatgacatggatttatctaacattatttgtctttgcaacatttcgacttactcgtctaattgtttttgataaaatcacagcgtttattcgtaaaccgtttcataaaattgtagaagatcaagatgaacaaggaaatacggtaacttatctagagataaaagggaaaggactgcaaatgtggattggagagctgctcagctgttattggtgtacgggcatatggtgtgcggtagggatttattttagttatgtagcgttcccgcatattgctattcctatcattacaatcttagctattgcaggatgtgcaggaattatagaatcatttatgaaataaatggacgagttaaaagacatattgaacatcaatatgtcttttaataattaagggaaatttagcactactttattaaaaaaagggatgccttcttgccactcttcgctataaaaaaagccttctagaataaatgaagtcgtatcggaggacagcggaatgactacttgaaaagagtcaaatagtaatttgtcttttggctttaatacattttgcttaataggtttgatccaatattcaccgtcattttgaattttttcgttccattttggatgagcatagcgccattctaaagaagaagaggggatactggaaacttcaatgtctttttcatcaatgatcttcccgcttaatatagccgaagcagtgggtttcatttttaagcaaagcaccggagagcgtaaagtactgctcgtttgattttgaataattacgttgccgaatatcatcagctcgctttcatcttgttccggcagcagtatagaatgttgaaagaaacagaggatatcactcttttcgaacctttccacaggtttttccacaattttttcgattactttttccacaatcttttcttcaataacgggctgttttctcgaggctttttcccgaaatgcttctgcaataattttttgttcagaaagctcgtttcttagtaaatccagctctttttctaatccttcaatttctacttctttttcagatgtagaaagcgtctcagcgtgctttttcttccaaaacgatgtattttctttttctcgttccaaagctcgttcatagctttttaattggttttgtacgtgccgaatttccgatttatagtgaatgagcttttgttttaattgagttaaatcatctttaggggaaggggagttacgactcatctagtagtctcctttcctgctgagctatgaattaagtttgtaaacctgagctgcccacagcagttttatttatatgtatgcacaaagcttgtaaacgatgaaaaaagaggagaaatattctcctctgatggtatctaattaatcaaaatctgtttcaaaagaactttcgtagctgctactttcctcacaatcatcgtgatggtgacgtcttcctgggaaaatcgcttcacattgaggtggatattcaacaggtgcgcaaccgctagctgcatctataatttcagggcgagggtagcagaagctgccttccacttcaattttaacatctttttcgatttgtacactgaaacataacacgagctcaaagcttaacagctgtaagtcacagtgtgacaatctgatagaaccgccggatccttcaaaagaatcaaggtgaacaactggctctgtgccttctggagcacaaaggtaaaacgtttgatgtgtcttccatggaatattacaagaaataatttcatgatgtttgtgatgaccacctaaatccattaacttaatcttgtagaacccactgatcgacaatctaacttcatgaagaataaccacttctccatccggtaacacgatttttctagcgcggcgaccaccgtgtggcacaagttcaattactttatccagtgcatcttcatctgaaggatccacaggtttaccgtcactatctgttaaaataatttctacttctacgtcatgccctaaatctttaagtgcttcttcttcaaataatgaagtgtcattcgtaaagatttgtggtaaaacaacttgacgtctaacccagtcgtacactttaggcacgcggatacataatgattcaaaaagttctcccatttttaaacctcctaattgtaattgtccttcctttacgcttttcgttactaggtatcggactactatagtgtatgaatgacctgcttttatgttccttagtaaaagcggaatttatcggaataaattctagttggagcgagcataaaaaatgaaggaaataataaactcaattacagcatattcatgttaataaaaagtgttattcatctttaactgattttttagaagtagtgggttatttataatggaggagtgaagggcatgagtgaggaaaaaacaaaacaatatattgcttcattgaagtcagaactggctttttataaagaagaatatcaaaaattcaagcatcaagaatttgaacatgaagatattaaggaagagttagcggaattaaagcaaaagcatgaagaagaaaaaaggaaactagaggaaaaaatagattggcttaaagcatgtgttaatgaacaaaaatcaaaaaccgaacagtccattgtacagtacaatcatgaagcacaaggaaccattcaagagctgcaaaaacggctgcgtgaagtgacagagcaaaagggaggagaaagatcaagagtaagaaagccaaaaaacagcacggatttatttttgtccatgcagcgcaaaatggacaaataagatagaacgtctttctttagtcctgaatataatgttatagataggatgctgtgaaaaggagggaaaacatgatgtattatcattataattataatcctaatcaataccctcagcccctgccttatcatccacaaccaatgacaaaacaatcggtaaagaaagggcagtctattcctaagccagtccagtacccttctccaaaacaaggtggttgcggctgtggttcaaagttaccaaagcgataagcaatagaagcattgtcactcggacaatgcttttttacatagagtgtagagaggtgtagagatgccggattttttcaatgaatttgaacgtttttttgaacagcatatgatgggagaacatcgaaagagaatgaaagaagtagaaaaagaagaaaagcagatggaacagcaagagaggaaactgcagcaaaatgtaaaaagacttgatgagcaagatgctgaagatccgtttggacaatgaaatttaatgtacacagttgaaaagcccatacaaaatcatttgagtgaacatacagtatagagagtaaaacagagggggtgtaatattatgggctgcggatttggctacggtggttgtggttacggtggtggctacggcggtggttttgcgttaatcgttgtattattcattctattaattattgttggttgtgtttgtttttacaattaatcccttctatgaataaggcaccgaaaagtgcgggtgaagtttcactcgcactttatttttttattaaatgtaaagggcaccatctaggcacatggtgcatacgatgaagtataaataaaggaggtcatgcaaaatggataataatatgtttaaaaatatagaaaagaaaacaggcgttaatatgaaggatatttttgaacttgcgaattctgtacaaaatgctaattttaaagatgagcaaacggtgcgtaatattgtgaagcgagtagcacaaattgcgaataagccaatttcaaaacaaaaagaagaacaaattgttaaggcgattgcaaacaataatcaatccattgattttgcgaccatcgctaaaatgctaaatgagaaaaaataattcaatgtttttatataaagccctgacgtgtcagggcttttttctatttatgcaatttcatttgtttgaaatgcgttagaatcaagatcaaacagttccggatgctgtgctaagtaattaatttctttaatacgatgagcgagagggggatgagttgaagtagcttgagtcaaccacataaaaaaacctttttcctgtgagtgcgtatgaacaaattccttctgatttacttttttatttagacaatggccaaccgcaagtatagtgagtgcttgagtggcagcttttgcatcaccaatcgcaacggaagctatgcgatcacacgtatattcacaggccctagagtaagcttttcctaaaaaaggaacccaaagagcaggtagaataagtgagtggtagagtgtatgcttacgtttgatatgaactaattcgtgggcaataataaaagaaagttctttttcttgattatcttcaatcatttcaacaatgtcggagtataaaacaacaaagtgacgtccaaaaaaacgtgtagcaaacgcgtttaacaagccgcctgattgaacaatataaatatcgggcagctctaaatccagctctgaagatagatgttttgcctgatgataagtgtgcgggaactgcttctctgtcaatctaactccattattgcgaatttgagcaatagagaaaccgtggagtataaatgtaattaaaaaaccgattacaagataaataataccaacgaatgaaataattaaaaagaaataggttaataagctaataaccatacacagaatgaaaaaaatcttttcattttcatgaataagctttgcgttcaataatggagccccctaaaatatagtagtacagtacataacgtagtgtaacgcatccacttatgaatatctacctcttagtggaatatttggttaataatagatgatgagaatattagttatggacgctagcatgaagtaagaaaaagaggttgaaacataactacaggaatcaaatttaaagacaagcaatctggattgcttgctcgaccgctgttgcttgccgtgcaagacttcgctttccgcgggcggccgatgagcccgcaggagtcttcgccttgtcctccaaccaacagctagaagcacctgcgttcaccatgattataaaaaacacgaactatttatccgtttatgatagatagttcgtgttgcaatttaatgaaactacttttgtcccagcctgtttttcctttacactttttttataaacgacttcaggaatcttgaaggataagcggttttacctcttctagtttgcggaacagataagtaaagtgaattctgtgcacgcgtcatggctacatataaaaggcggcgttcttcttgaagcggcacatcatctccgcctcgataagcttcgagtgcataatcatgaggcaatccgccatctacgctgctcagtacgtatacatgcttatattcaagaccctttgctcgatgaattgtggttagctgaatactttcattaaattgcttgcttaaagctttcatctctgtgttcatggcaatcatatgatccacatgctctaacagttcaggtacggttttaaatttacgtgctacaacttttaaatcccgcacgtcatccgaacctttttccatcatatttccttcatttccgcgttttttgacaaaatcgtcgaatcccatatctttagaaatcgtctcaagtgccaaagaaggagacattgattttagcgacttgaataaaggaattactttcttgagctttttttgctgaaatggttttaaatcttgaagatattcaagcgcatcaataaatgtaccatcatgaagaatacttgctgcttttaagtcgttgactgctgttttctttaaaaagagtgcgtttactaaatcttgcagcgaacttgcgtcatttggattcacgctcaaacgtagaaatgaaagtaaacttcgaaccattcgtcttttataaaacgaatctgcatcttgttcgattgaaaatggcaggtttgactgcgataaacgttcaaagatggcgcgtgaagaagcgtgagttcggtacaagaccgcgaagtcagttggagaagctccttgcttaatcttttctttcatatccgttacaatcattgttgcttcttcttcctcgtcatatggaaagaagaaggtaggtcgcaactcattatcaaactgggcagccatttctttttgtcggcgcgctgtatttcgtgcaatgactttattcgcggaagaaacgatggcatgagctgaacgataattttggtttaacgtaataacagttgtattagcaaaatctttttcaaagtttaaaatgaacgaagggtcgcttccgcggaaagcgtaaattgattgatcatcatctcctacgacacacaagtttttagagccttcacttagcattttcataattttatattgaactttattgatatcttgaaattcgtcaattaaaaaatagcgaaaccttttttgataacgagttagtaaatcgggattttgttttagcatttcataacatccatacagcatgtcatcaaaatcgaatagctgtttttgctttttgacttcttcataacgacgatataaaaagtgcacatcttgttcccatttgtcctttgggcgaacatctttcacgccaacaagcgtgtttttccaatagccgatttgctgaagggcctgatcaaagggaaaatctttttcatccacgtggagctctcttgctgcttctttcacaatctgttctttttgccaatcccattttagcaggcggtccatttgccacgcttgaggattatgatgaacaatcatacgtaagaaaatgctgtgaaaagttccaactagcatttgacgaagatgtaagccggacatctttgggtatgtagccaatcgttctttcatttctttagctgatttagccgtgaaagtcaccagcataatggattttggatcaatttgtttttcttgtatcatatatgcggtgcgagctgttaatacacgcgtttttccgctgcctgcaccggctagaataaggagcggtccttctgaatgtgtaacagctttccattggttcgaatctaattcaataccgctctctttaaattcatttaaataaggagagtcagagtgtttaggaacagctggttttaagcgaaaagcaggaacacttgaaaaaggtgcggaagacctccatgtcgctttctcttttacagttgaacttttctcaccaatagctcgtcctttaggaatacgaaatccattggtttctctgtattcagccggagtttcttttatttgttgcacagctattgtttctgatagtatgtctgaacactcttctctttcatggggaacttgagcatgataaaagtaaggagaatgctcaatccccagatataatttaactggttctccgcagtgagcacacgttatttctcctcggagactagcttcatataaatattgaaatcggtctctagccgttatagcaagattaagtatctgattttgataaagtgcacgttgcaaaaaacatggcctcctttttaaaacatgaataatcaatagtaaataagagggagttaaagcaagaagccgctctcgttctacatcgatatagatgtgtgtatacgcacagtttttgttttatagtcaaagtctatcatatcaaaatcacctttttttaaaaagagcacggatatttttggagggataggatgtaaaaaagggtatatattgaataagacatcacatatgttcaaaaaaggcggtatagatacaaggtgccatctgttttgaacaagtctaaagtagaggatttaagtaagctgtttcaatgtcgatacttcttgagaaaaatactgaggtctgggagtagaaggtatcttgaaaaagaggagggttcatatgggatatatactgcccgtcacgccttatcaatctattcaatatgcaaatcgccttcaaaaaaataatgcttctttttcaaatcgtatttggtctattgagaaaaaaagctttgacgaagagtttgattcgcgttctcacttactggaattgacgccaagttcagtacaaaagcgaaaaaagcttcaagcagcagagcgtgtatacagcaagctaacaaataagggcctagtgattaatacacgtgtctaatacaaaaaatcgtgaacgcagcagaatgaatgcgctcacgattttttaacaaagtaatgaacaagtaaaaaacatcttagtaagattcaataaaaagagtactgccctgctgccattcagcataaagcacctgtttataatcggtaaatccctgttttttcaactgtgtctttaaccagtcttcatcaaagcctgactgaagcaagtttttcaaaagcaaacgtccatcactgacgaaggcgatagataaaacgggttcagaaggaggcagctgtagatcgcttcttgtcggcttagcataatcagattttggcaatacgcttagtgatccatctgtttctaaaatcgcatattcaacttcccgaatggaaaatatgtcttttgaacgaagcatatgaagaagctgatcgatatccaatcgatttttgctaagttctttgtacgaaattttcccttttcgaataataatagagggccgtccttctaaaaacaaacgcaggcgaatatttttttgagtaataacttcggtgacataaataagcgctccccaaaagataacagcaaataaaattttgcctattcctacttctgagtcatatagcgcatttcctactaactctcctaatacaagagcagagataaaatcaaaagtggtaagctgagtgatcgtcgctctgcctaaaaatttagttaaaataaacaggcagataaatccgataaagagttctaatgcaattccgataagttcatccatattttcacctaattcacatgattaggtattagtataagcaaagcaaaggttcttatcctttaaaaaagcaaaaacaccaggttcaattcctagtgttttttacttagtttctttaccatctctacatgtggaattccagcatccataaattcacctgaaaccgttacgtagcctagctttttataaaatccttccgcatgcgtttgagcatgcagcttaatcttttcaatctcatgctctgctgcgagctcttctaacttatccatcaaaagctttcctacaccgtcttttcgataagaagaaagaacgcagattcgttctgcttttccatagtcctctacaatacggaagcgtcctgccccaattggtgcagttcctttgtatacaactaaatgcagggcttcggaatcgtattcatcgatttcttgctccacatcaacctgctgttcttctacaaatactttttgacgtacgaagtaagcatcagagtgatcttgtttgttcgttagtactttgatgttcacgtatcttatccctttccaagacgaaatgtttcaaacacagtccatgtttcattttcaagctggtacattaagtgaaagcgatccactgtttcttcatgagcgacatctacaagcttcaactggctatacacatctaagtgctcatcatctgaaaggcgttgaccaattgtaatatggggaataaatgaatattcagttggctgttcgagattgccttcatgaagtttattgtaaagtgacgtcagttcttgcttttgttccacttttaagtaaataacgttattagctggtgaaaatgagcttactttcgttacatttaatgtaaatggatttgtttcttcggcaattttacgcaagttagccgcaatttcatcaatttggtcttctgtagcttcaaagacttcttttaatgtaagatgaggcggaattaatgaatagtgagaatcatagcgctttcgataagaattcgctacatcttgcaattttttagatggaaaaagtacaacgccaaatttcataaaaaatccctccaaagtaagatcataaaatatgtataaagcgagcttattataacaaattttcaaaaaatatgatatctttctacttcaacatatattgaagcgaccgctttacatctttttgccagtatttccacgtatgatttccattaaattcttcgtagaaaacagaatatccacgctgcttcatttgttcgtgcaacaggcggttaggttcaataaaattcaatataccatcttgtgttgttttgacagccgtttcttcagttccaataacatgatacaaatccagaagtgaaggagaagcaaatgagttgaccgtttgtaatacagcatcgttcacgaaaggagaatgcataattactttcccgaacgtgtgaggatacgcaatggccgtcagcagtgaaactgtagcagcaagcgaatcaccaattagaacacgtgattttcccatttgatatgtaggatatgttttatccaaaaatggcacaagttcatgtgctaaaaagcgaatgtaagcatctacttgatttccttctggatgatacttatcgcgtctgtcttccacgcttttatatggaattccaacaaaaatagtacgatcgatttccgactcgttcattaaatcatcaattaaacgaggtgtccgtccgtacataacataatcttttccgtcttgggcaataagtaaggaatacttatagagcgtagaatagtttgacggcaaatagactagtaacgtgacatcttcttgcagtgcgtcactataaaaagaaatttcttctaacttccgcttactttctgacatgaataatcgactcctatgcatttgaatgaaagcgttacctttattgtaacacattttctaataaccgttctttattttattgtaacgaattttttagcgaatgacgagaaagaggcatgcgttgctaaaaaagaggctgggacataacgaaatgaatttcatccaaacacgaataatctggatatagaatctggccagcttgctcgaccgcagttgatttccgtgcaagactccgctttccgcgggcggcccgtgagcctcctcgtcgcttgcgctcctgcggggtctcacctgttccgctgtttccacaggagtcttcgccttgctctccaatcaactgctagaaggaacgaaagagataaaatctgcgtctactttaacaaaaaaacgaatcattaatcaaacagtttgattaatgattcgttttttacttcggctacactacttttttccaagcctcttttcgttaatctaatttcttcatctttttaaacatatttttttctgcttgagtggctttttctagcggcttcttcgtatattcttcttctttttcatcaatcgaaaccaattgtgtatcattttttacataacttcggatattgcgagcaccgaaatagccgtttacatcttctaaaataggcttgttttctttttgatcataaagagtatatgaattctcttccttaacgatagcgtagtgattccctgctagaagagctacggcttctttttcgctttttccaaaagtagacatgagaaacagaacgattaagacgataaagaaaagggctgttgcgccaatgaaaaataataataagcctctgctaaatttactttgtttttcttccacagtagacaaacctcctgattagataattttattatagcaagtaaatgtaatgagcgcctaaagagatatgtgacgagtttatgaattcaggtggatgaaacaaaaaaggtttttagcgcctctcatcgaatttaatataaagagagacaacaacttgaaaaggagagagagacatgacagcgaaaaaaatcccaacgagcaaagaagtagcaaaggcaacatttgatttgctagaagagcgtggcgtaacagttttagatattgctgaaattgtgtatgatttacagcttccttatcacccagctctaaccattcaggaatgcgctgagagcgtagagagagtactgcaaaagagagaaattcagcatgcgcttctagttggaatcgaactcgataagttagcagagcaaaataaattatcagaacctcttcaaagtattgtagaacaagacgaagggttgtttggtgttgacgaaacgattgctttaggtgccgttttaacctatggcagtatcgctgttacgacctttggctatttagataaagtaaaagtaggcattattgaaaagctggactgtaaaaaagaaaaaggagttaatacctttttagatgatttagtagcgagcgtggcttctagtgcggcaagtcgtttagctcaccgtcagcgtgatgaacaagaacagctgcaagaaggcaatccggctacgtaataaatttcttttagtatgtatataagctgcgtaaattaacacgccgaatgatttagtcttttatttaaataacggagactaggcacgtatcacctgcgtgtctagtctccgttaatggaacgatttatggctgtagtgaagtagtcataaggtagcttaagtttttcagcccaagactttcataaaaagcacgtgctttctcgttaaatgcccatacggtaagctggaggtcacttgctcctttttgtacagcccactgtttcgtagcagaaaaaagactttttcctacgccataattttgaaagcctttcttaacgccaaaatattggatgtacgctgtgtaggaaagaggagctaatgtagtgggagggttatattttaattcaacaacagacgccccaataatttgatttcgatattgagctacaagaatatcaatagttgcataataaagagtagcttgatattgttccggagataaaacagccatctgattatcaaacatagaaggaagcgcatttgcgtggagttctagtgattcccctaatattttatttacttctgtataatcatcgagttttgcagtgcgatagataatctccatacacacttcacctactttttaaaagttgtgctttatcatatgtagcagcttaaaaaatgttaaatgagaattaaaacttgaaaattttaagggaagaactgcactaaacagagcatatattctatgctctgtttgatgttatagttgaagaatatataagagcgaaacgttaaattctagtttcagcaatggcatcgcgtactttttcaagcgagtgtttagaggcatctttattcgcaatcattacattaacgtacaaagcatcaatgaggcttagctgtccaattcttgaggcaagagcttcagatcgatattctgtttcttctgaactcgtataaagagaaacatcgacattttggcttaatggagattttggaaaacccgtaataccgatcgttttggcaccgttcgcttttgctgtatttaaaatgttcatcgtgtctttatttgttccagaatgagaaatcactaccgctacatcctgttttgttaattgagaagcggacataagctggaagtgggaatcaataaatgcaaacgttttaattcctgttcgaacaaatttatgaaaagcatccatagccactacggaagacccgcccgtgccataaaactgaactttatccgccttcataagaagtttgacggctttttcaatagcgttgctttctagtatttgtaatgtattttcaagcgttcgcacattggagcgaaagattttttcagcaatcgttttttcattatccgtttcagcaatttcctcgtgaatctgctgaataggtgtcataatttcagcagccagcgctattttcatcgcttgatagcccttgaagccaattcgtttacaaaagcgaaagactgttgcatcagctacatttaaatcgtctgccacttcgttaatggtactgtgaataatttgttccggctgttctaaaatataatttgctatttttttctctttttcactgaatctagcatagtgagaacgaatttttcctaagcaattttgcgtcataactgatgttcctttccacgaatttagtagtaaaaagagtatagcacaaaaatatgagtgaaaaaaattttcttgtaaacgattgcaaaatgaaaaataattcgtataatggaggtaatgtgaaattttttttcaaagggagtttgtaaaatgaaaattggattaatcggtttaggaaaaatgggatataatttatcattaaatttaatggacaaccatcatgaagtagtagcttatgatgtaaataaagaagcggtagaaaaacttgcaaatgaaggagcaactggcgcctttactgttgaagagttagttaatgaacttcctcattcacctaaagttgtatggattatggttccggctggagaagtaacggaaaatgttattacagaactaaaagaacttctgtcagaaggagatattataatagatggaggaaactctaattataaagaatctgttcgacgtgctcaggatcttcaggaaaaaggtatttacttctttgatgtagggacaagcggcggaatggaaggcgcaagaaacggagcgtgtacaatgattggcggagatgcggaagtattccgtacaattgaaccggtttttaatgatatttgcgtagaaaatggatttatgtacgcaggtaaaagcggaagcggtcactttttaaaaatggttcacaatggtgtagaatatggaatgatgcaatccattgctgaaggatttgaagttctggaaaaaagtcagtttgatttcgactatgaagccgtagcacgcgtttggaataacggatctgttgttcgttcttggttgatggaactaacggaaaatgcgttttcaaaagatcctaaattagacagtattaaaggagtcatgcagtcttctggagaagggaaatggaccgtagagactgctcttgatcttcaaacggcaactcctgttattgctttatcgctaatgatgcgctatcgttcattagaggaagatacatttacaggaaaagttgtagcagcacttcgaaacgaattcggcggccacggtgttgtaaataagtaaagtagtaaaatagggggacagcagcatgagcaaaaaatatgcaataggtgtagatatcggaacaacgagtacaaagtctgtattgttttcagtagacggtacagtcattgcaaatcatgggattgagtatccattatactcgccgacgcccgcgatggctgagcaagatcctgaagaaatttttcaagcagttgtacgtacaattcaaacggttgtaaaaacgagcgatgtaaaacctgatgatattttatgcgtttcattcagctcagctatgcacagtgttattgccgttgatcagcagggaaaaccgctgacaaaatgtatcacgtgggcggataatagaagtgcagaatggacggaaaaaattaaaaatgaatacaatggccatgagatttatttacgtacgggtacgcctattcatccaatgtcgccgctttccaagctaacatggctttctaatgaacagcctgaattagtgaagggaacacataagtttatttcgattaaagaatatgtattctttaagttgtttaacgaatatgttatcgactattcgattgcatcagcaacgggtttgtttaatctaaaaaatcttgcgtgggatgaagaagcacttaaagtagcaggtgttacaactgatcagttatccactcctgtttcaacaatgcatcagttaaaagggttaaacccagcgcttgcagttgacatgcatttacttccaaatacgccctttattgtaggtgcaagtgacggcgtattatcaaatttaggcgtaaatgcaattgaaccaggcgttgtggctgtgacaatcgggacaagcggagctattcgagcagtgactgacaagccagtagtcgatcccaaaggtcgtattttctgttatgcgttgacagaagaccactgggtaattggcggccctgtgaataacggcggtatgattttcagatgggctcgcgatcagtttggagcgtcggaagtagaaacagctaaacgccttggaaaagatccgtatgaagtattaacggatattgcagctttagtgaaaccgggagcggacggcttattgtttcacccatacctttcaggagagcgtgcgccgctttgggatgcaaatgctaaaggttcattctttggcctaggtttgcatcataaaaaagaacatatgattcgtgctgtattagaaggagttatctttaacttgtatacggtattattggcacttgaagagttaattggagagcctacaaaaattcaggcaacgggcggatttgcacgttccgcactttggcgtcaaatgatggcagatatttttaaccaagaagtatccgtgccggaaagttttgaaagttcatgtctaggagcagttatccttggcttatatagccttggcgaagttgactcattaaacgttgtttctgatatggttggagcgactaatcatcattatccaatcaaagaaaacagtgaagtatataaagagttaacggctatctatattcgtttggctcgcttatttaaagaagaatacgaaagcattacggcttttcaaaaaaaatatgtacattaagttcaaaaatcatcgcttgaagttttcaagcgatgattttttgcgtgttaggttatctaacaaccaaaagagttgacactacacaatatataaaagttccctcaaataatgttacaatttgtccagtgtatccccgtttctcattaaatataataaggaataacgttagtatttatcacatactagaaggaatcgtcacaaacgcctctatatttcagaaaattcaaataaaatttgttttttgaaatgaacttattttatgaaaaggggttttatggatgaaaacacaaattgagcaagatggaattgtaacgctcacagatgagacgcacaatcagctgagcggcagtgacctttggaatgaggatttacgtccgactacgatgaaagagcattcttggaaaggagttaactttgccacgctttggattgggatgtgtctgtgtattccagcttacacaatggcgagtggaatgatgacgcttggaatgaactggtggcaagcaattggtacaatctttttaggaaatgttattgttcttattcctattttgcttaattctcacgctggaaccaagtttggtattccttatccagtatttgcccgcctgtggtttggagataaaggagcacatatcccagcactggctagggccatcgtggctgctgggtggtttggaattaatacgtggattggaacggaagcaattgatacactgctaagcgcttcgttttcatcttggaacggcttagctggtcatacagccattgtatttgctcttttttggcttttaaatgtaggagtggcatataaaggaccgcaagcgattaaagtattaggagcgattgctgctccggttattggtatttcagctattattctttttatctgggcttatacaaactccggagggtggggcccgattttatctacgccttctaaatttacatcaaccagagaatttctagctgtatttttccctgctttaaccggagtcattgcattttgggcgacgctcgctttgaacattcctgatttttgtcgatatgctagaagtcaaaaatctcaaatggttgcgcaaaccttctctttgccattgacgatgagtattttttcatttattggaattgctgttacctcagcaacaatcgttatatttggagaagctatttgggatccagtggccttggtagctaaattccctccttttatcattttcttaggaacaatcgttatcgtgctttcttctttaacgattaatgtgggagcaaatatcgtcgcaccagctcgtgcaattgagaatctgaatccaaagaaaatcacgtttgcgatgggggcgctagtgaccggtatttttgctattttacttcagccatggtacatcatgtctaatttcgggaactatattttcggctggcttggaacatacggagcgctgcttggccctatagacggcatcgccattgctgactactggcttgtaagaaggagacagatggcattaaaggatttatatgaggtaaacggtcgctacagttattcaacaggttttaataaaaacggtatttatgcattagtaattggcgtggccatacccgttttaggcttactgattcctggactgcgctttttatgggataatgcctggacatttggtctattcatttctatcatcgcttacacgtatctcatgagaggagataaaagtatattagcgccgggggaatatgaagaaataacgttaaaaacaagcgaaaaaacgattatcgacagtcaaacggctgatccaaccatcaccaaataaacaagaagaatccaatcattaacatgattggatttttttatgtgttaaaactgtatggaagaaaattgataaaatttttttgagtttttttattgatttaagaatttttttttcatataatttaagtaataaaaaaatgaaatcgttttctgaaataattaatgtaaacgatttcgatatttggaacttattttttaaaaaattcacagggtgtagagcttttttgtcacatgaagaaagcgtttacttaaagggaaggtggaaagcaagatggatgcatacttattagctattacagttgccgcaattgttattgttattgtaggtgtttcagtttttaaatggcatgcgtttattagtttaacggttgcgagtttgtttttagcaattgcttctggattatcaatggataaaattgttggcgcttacgaaacgggagtgggcggtgttttaggccacttagtaggaattttagcgctgggaacaattttaggtaagctgatggccgattcaggtgccggcatgcaggtagcggattatttcgtaagaatattcggtgtgaaaagactgccatgggcgatgctagtagcaggtttcattattggtattcctgttttcttcgaagtaggaattttaatcttactgcctttagttatttctattcataaaacaacaaaacaaaatatattattgattgctctgccagttattgcaggattatcaattgttcatggtctcgttcctcctcatccaggagcgatggcagctattagtatttacggagcaaatacggggaaagtacttttatatgcattaatcatttcaattccagctgcagttatcgctggaccagtttttgcaaagtgggttcacaaacgagtggttccagaaggagaacctgatctaattcgtattacgacaacatcaaaagatcttcctggtacaggcgtttcattttttgtcattttactgcccgttctattaatggtcttagcagctatagcacctgttattaacggattgccaaacggcgtagtgaagtttgtagaattaataggaagcccattaattgcacttttaattgcttgttttgcagcgttttacctgcttggaaaacgtcaaggtatgacaaaagatgtgattaaaaaactaacggaagaatgtttgcttcctgtaggatctattgtcttaattattggtgcagggggcggcttcaaacaagtattaatcgatagcggagtagggacaacaattggtcaaatgtctgaacatctgtcactgtcgccgcttgtacttgcatttttaattgctgggttaatccgtatcgctacaggttcagcaacagttgcattaacaacagcggcgggtattgtctcaccaatcattgagcacatgtccggtgttaacttagaacttcttgttatcgttactggtgcgggttcactaatgttctctcacgttaatgatgctggcttctggatggtgaaggagtatttaggattaacagtgaaagaaacattcaaaacatggaccgttttggaaacgcttctatcctttattgcttttgcaggagcacttattctaaatgcactaatctaaaaataagactcttttactctatgtaaaagagtcttattttttttatgaaaaaaagaatttacaagaataataatcaaaatattttatttattcgttaaattatggcagaatagaaatagaagaacaatagcttctaagaagggaatgacagagagtgagtaatcaactagtatttttcacaaacttttcagaaggaaaattagattcagacgtttcttggtattgtccaccagctcaatttcaaattgatacggaaacgaatcgattagtgattaaaacagatgctaaaacagatttttggcagcgtactcattatggttttgaagcggacaatggacactttctttaccgtgaagtagaaggcgactttgaaatcatgacaaaggtgcatacatatccagttaatcgctacgatcaagcaggtctcatgattcgtgtatcaaaagatacgtggatcaaaacgtcagttgaatacaatcccgatggtcctaaccaattaggagcagtggtaaccaaccagggcttctcagattggtccagtcaaaattttactcaaaacaaatcagcgctttattttaaaattcagcgaaaaaacgatgattacaccgtttgttattcaagtgatggagattcgtggactcagcttcgactcgcttacttattgaactcatccaaagaacctgttcaagttggcatttacgcttgtagtcctcaaggagaaggatatgaagcccaatttgattttataaaagtagaaaaaatttaaataaaaaacacgatttagtcacagctaaatcgtgttttttatttggaaatcgcattatctaaaggctgtgtaacagaagcgggtgtgggttgattgtgtaaagcaattttttgtttaaagtagctgataacaaaccctgtaattgcaatagacatgacagagaaaattccttttgaaaatccaattgaatacatgctcgacagcacgacaaggaaatcaaatgaaaaattcacttttccaggatcccagccgaattttcgctgtgcgaatagcgctagaatattagcaccgccgagagaagctccgttcataaataaaatggataacccaaggcctgcaattagtccgccagtaacagcacccataaggctgggaagtgtaaaggaaggaagcaagtgatcgagtgaagtgagaagtgatagtaaagacactgatcctatagttgtggcggtaaatttccatcccatttgaaagaaggaaaagagataaaaaggaatattaatgagaaaaaagatcaccgcaaatgataaaggaagagcatatgacaagctgagagatagaccagctgttcctcccgtcactacgtgagagtgtcgcaagataaggacaccaatacttgcaattgtacatccaagaataatccataaaacttttcgcataaataaactcctttgtttgtttttttctgaattttcattttcaatcatctactttaatgataggatattaaataaagaaaacacatgcataagtgaaggaaataatacttgttctgttatcaacttgaatgaagattttatttattatattcattttgaaaggaaaggtttgtatggatcaaatcgatgtacaattattatctattttgcaaaaagatgggcgtatgacgattagtgatttatcaaaaaatctggctcttagccgtccaagcgtatcagaaagactgcagcgtctgcaggaacgaggagtgatccagcgtttcagcgctacggtgtctccgaaagctttaggaagagatacacagctatttattcaagtaagcgaattaaaaagaaaaccagaggaatttgaagactttattgagcaaaatgaagatgtacttgaatgtcatcgtgtaacggggccggtttcttattttatcaaagcagcggtgtgtggaatggaagggcttcgaatgctggttgatgaactgattccttatggaaacgtgaatacgtcgattattttaaagtcgcctgtagaaaacaggatgattactcctgtacaaaaaccggccccataagaggccggttttttgtataagaacatattaataaaatcctttaataatataaaaatgattttgtaaaatatcaggtgtttcttcttctgaaacgttccttttcgtctttttttcgccatctgttacagttagcgtttcaccagagagggtaatgcgccctgtaggggttgcgatcgtaacaagacgtttgtgtacaaacggagaatcggctgacgtttgattgaactcacacatgggagtaaagtcagtcagtttcttaggaagcgtagacacacggtacagcgttttccatacatcatcttcccatcgctgtaaatcatacatatgctcagcaacgtttgtcatacgataagagccgcttacatctcttactacttcgccatttaaaggcattggcttgcgcacagaatctccaaatccaacgtctacgatgtaagactgattttcaatcgtcacaaggtttgtagcgtgacttccttcaatggtccacgtgccgtcgggttttttgacggtagctgaaacgtaagagacttcatatccgctttcttttaacagccagccaaatagaccgtttaattcgtagcaaaatcctccgcgtaaatttacaattactttttgaaaaattcgttccaaatcaattataataggggttttagacagaacatctaagttctcaaaaggaacatgaagcatgtgtttgttctgtaaagcagctaagctttgatacgttgggctatccggtttcttagctaaaaaccggctaaaataataattaatattcatcaaatgcacctcttagtaaatcatttctctctgtctttagcagaacgttcatgtaacagctctttttcgattgtctctttggaagcgaatccttgaaatacacggctgccaatttttaaagttggtactttcgttacatgagcattttcatacgcatgaactaagctatctttatgaacttgttcgaacgtccggtcttttaagatacgtataaatatttcttgatctaaatgcaaggaatcagcgatttctgctaagacttcagtctggctaatatctttttcatcttcccaataagctttaaaaacagcatctacataggcactttcttgaccatgttttttagcaaaatgaaagccttcatgtgctaaatgagtgcgcgggactggaggactctccggcatatttatttccacgtgcagctgttgtgctaagggagctatcgattgattccaaggtctctctaaaaaatcttttatttgctccatctgctgggctggctcaggccaaagttcaaaaggcttccattcaatctcagctttttgttctttcatgacttctctcaaaggcttagtggctagaaaacatagtggacagacaaaatcaaaataaaattcaatatgcgctttcatcccgtcacgctcctttatggcatgtttttattttatcaaaagtaaagacgatccttccaacttgggaactgtggaaaaatagttgacaaaattggataactctttctataatatagtcaatacatatcacgagcgattagttcagtgggagaatacatccttgacagggatggggtcgggggttcgaatccctcatcgctcataccaaagccgttttcttattaataagagagcggcttttctcttttgtttgacaaatcaatgttacattaaatcttgagcgcgtatagaagaattaaagtataatgaaacatagtgcatcaggtcatgataaagataatcactaatttaaaataaatgagggtacaaaatgaatcaaagaagttttagtcaatatggtcttagtgacaaggtagctaaggcgctttctagcctgcaatacaatcatcctacggaagtacaaagcaaggtgcttcccatcgcgctagaagaaagagatgttgtcgtgaagtctcaaacaggaagtggaaaaacggcttcctttggcattccactgtgtgaattagttaattgggaagaaaataagcctcaggccttagtgttaacacctacacgagagctggccgcgcaggtaaaagaagatattacaaatatcggccgttttaagcgaattaaagcagcagctgtctacggaaaatcaccgtttgccaagcgaaaagtagaattaaagcaaaaaacacatattgttgtaggtacgcctgggcgagtgcttgatcatatagaaaaagaaacgcttgcattagagaaaattcgttatttggttattgatgaagcagatgaaatgctaaatatgggttttattgaccaagtagaagcaattattcaacatcttcctagtgagcgtgtaacgatgcttttctccgctacgcttcctgaagatattgaagagctttctcgcaagtatatgaaaaagccggttgatgttgaaatcaaagcgaatggattaacgacaagtacgattgaccattctgttatatcagtagaaaacgaacgtaaatttgaactgctgaaagacgtaaccacagtagaaaacccggacagctgcatcattttttgccgcacgcaagagcaggtaaatacgctgttagatgatttagatgatcttgggtatccttgtgataaaattcacggggcaatggtgcaagaagaccgttttgaggttatgaatgatttcaaaaaaggtaaatttcgctatttagtggcaacagatgtagctgcgagaggaattgatattgataatatcacacacgttattaactatgaccttccgttagaaaaagaaagctacgttcaccgtacaggaagaacgggacgtgccggtaaaaaagggaaggctatcacatttgtaacgccttatgaagagagaatgctatcggaaattgaagaatatatcggtttttcaatttcaacatctactcctccttctaaagaagaagtacagcaggcagcatccgcttttactgaaaaaatcaatgagcgtccagaagttaaaaaagataaaagcgagtcattaaataaagacattatgaagctgtattttaacggaggaaagaaaaagaaaattagagcggttgattttgtgggaacaattgcaaagttagacggagtaaccgcagacgatattggaattattacgatccaagaaaacgtctcttatgtagagattctgaatggaaaaggtaccaaagtgttacaagcaatgaaaaacaaaacgattaaaggaaagaaattaaaagttcataaagcgattaaatagcagaaggaagtccatctttttaaagatgggctttatttatagagccaataaaggagttgagagtatgaagtacataaaagaagcgtgtgcagaagggtatgagcaggcaaaaaaagcagaaaagctaggagcagaccgcattgaattgtgtgacaatctcagtcaaggaggcgctacgccaagttacggcaccattgaatatgcaagcgaacatcttgatacagatatcaacgtaattattcgcccaagaagcggtgattttatatattccgaagcagaatttcaaattatgaaaaaagacgttaaagcatgtaaagaccttggagtaaacggagtagtatttggcattttaacagaagaagctgaaatcgattacggacgtactaaagagttaatagcagaagctcatcctttaagcgttacgtttcatatggcatttgatgagattaaagataaatacaaagccattgatatacttagtgaattgggagcagaccgtattttgaccaaaggagggaaaggatctgctttgcaaaatcttcatatgatccgagaattgatcacatatgctaacgaccgtattattattttgcccggcggaggaattcatgaaagcaacgcagaggcggttataaaagaaacaaaagcagctgaattacacggaacaaaaattgtaggagatttatctcgttaaataaaaagaggctggtacaaaagcattttaatccaagtgaaaaacgaaccattaatcaatatgtttgattcgtggttcgttttttgatggtgaatatagtttcatctatctcatttgttcatcttgagatcgaattcatttagttatgtctcaacctcttttattttgatgtattttcttttgctgctaagccgctcgtcattttggtacgctgaaagaaaaaagaacctacgacgagtacagcaattaaaagagttaagaagaactgagaacgtaatgaatcaataaatgccatggctataaaaataccagtgatggcaaggattgtagcgtaagttaagtaaggaaataaccacattttaatttttaatgcttcaggattttctttttcatatttttttcgcattttaatctgtgaaaatgcaataacaagatatacaagaagcgctacgccacctgatgcattcactaaaaacaaaaagattttgtccggtgaaatgtagttaaagataacgctaacgtacgagataactgtacaagctaatatcgcgctaaccggcacgccttttttatttaatttcgaaaaactttttggcgcatcgccgttttgagacatggaaaacagcatgcgagaactcgtatacagaccagaattcagacaggaaagaacggctgttaaaataataaagttcataatttgagctgcggccggtacattcactaattcaagaatagatacaaatgggcttttcattaggcttgacgaattccacggaagaaccgttactaaaataaaaatagagcctaaatagaaaaacaaaatgcgataaataacggtattggtcgcgatggtaatggctttttcaggctgagatgattcacctgctgcggttgcgacaatttctgttcccataaaagagaacatgacgagggcaattcctaaaaatacagagctaattccatttggtaaaaatccgcctttatgcaaaaggttagaagtgccgggagaatcaatgcctggaataaatccacaaataatagctatacctaaaagtaaaaaaagaacgatgctgacgactttaatgagagagaaccaatattcaaattctccgaaagatttaacagagtacagattggtcattgttaataaaaaagtaagagcaagacttactccccaagagggcaaagacgggaaccagtattgaataatgtttgcacctgcaatggcttcaacagcaataacgataacccagaaaaaccagtaaagccagccaatcgtgtagccggcccaagggcctaatgcttcttttgcataagtagaaaaagaaccgctggaaggatttgcagtagacatttcgccaagcatccgcatgactaaaataacgagcaaaccagcaaatgcgtacgaaaaaatagatcccgggccagcggtgttaatgagcgatccgcttccgataaacaatcctgccccgataattcctccaagagaaatcatggtgatgtgcctaatctttaactctttctttaactctggctggctgttcaattgtaaaacctcctatataacctagatttttagttaatatggagaattatagtatgttgtaaggcggaaggacaggatgttgttagaagttctttcatgtaaaaagccggatatgaattgttgcattcatatccggcttactctgacacagacattcattatgcgtataaagtatctgattagcgtctttttcttttattatgataagcaatggagatgaatttcttatgaacgttagctgaaaagcagctgaataatcgttttagatacgttaatcgaaagaggtatgcgtctaattaaaggatactatggaagaatttctaaactctctccgaagcgctaaatgcgggttttcctttctgaaaacgggtatatatagtagtaagaagtttattcttttgctaagtataaaagaaagatgtgcgatagaaacaggaggttataaataatgaaacatgttgaagtagtagaaaaaggagcaaatattaacgaagcagttaatcaatttgcagacaaaggttttgagaaagatgaagtatacgtgtttacgtatgacaaggaaaattctaaaaatttaacagaagtaacggacacaaatattattcgtctgtctgaagaaggtcctttacattcagcagcgagtttatttttaaccagagaagatgagcttcgaacaaaaatggcttcactaggcttatcaaaagatgaaacaaaaaaatatgaagaagagttaaagaaaggcagtgcgattgtagtggctgctacaggagaaagaaaagacgtttaattttaatagaggctatgaaaaaagtagtttagttaaaggggagatccgaacgcgtttgattcttgatagagaatcaaacgcgttcggatttttttgtggagacggtgtaacaagtgatctatacgagcttctttatcccatttgttcgtctttagatttaattgatttcgttatgtctcacactttttttgttttttccaatatatgattgataaaactaatggtattagttaaaataaaaactaataccattagtttttattttatatagtaggggatgaggaaatgaaaatagttcgtgaaaaaatgttgtatcaactgacgtttttgcctcgcttttttccggtaaactgttatttagtcgaagagaaagacagccttacattaattgatgcagctcttccttacagcgcgtccggtattttgaaagctgcagatcaaattggaaaaccgattacgcgaatcgtttttacgcatactcatgaagaccatatcggagcaattgatactttgaaaaaaagcttgccgaatgcttccgtttatatgtcgcaaagagattatcgattattttcaggagatttaacaatcgattcggaggaacctcaaaacccgattcgcggaggggttccaaaactaggaaagatttcaactgaaattgatcagttcattgaagaagggtcttgcattggctcacttgctcctgtttttacaccgggacatacacctggttctatgtctttcttagaccagagaacgaacgcattaattgccggagattctttccaagtgcaaggaggagttgcggtatcaggtcagttaaaaccgctgtttccgtttcctgcctttggaacgtggagcaaagagctagcgcttaaaagtgcagaaaagctatatgaattaaacccgtcacttcttgctgttggacacggaagaattctttctcagccgctaaaattgatggaaaaagcaatacaacaagcaaaagtaaaaatggaaaaaaggagatgaagagatgtcgccaagacagggactagatttcaaaaaagtgattcaaacaggtgaagatttggccaatcgtgaaggattttatgctgttacaattgcttcattagccaaagaattaaatgtccgtccaccgtctttatataaccatataaaagggttagaagagctgcgcaaagaactggctttaagtggactgcagcagctatatcatcttctaaaaaatgctgttgaacgtgcttctgcagaagaagctgtttatcagttaagtaaagcgtatgtttcatttgtaagggagtctccgggaatatacgaagcaacggcaacggtagcaccaaagatacaagataaagaagtacaaaaagcatctgataacgttgtgtctttagtgttgaatgtgttgaaaccgtatcaacttccggaaaatgcagctcttcatgctgttagaggtcttcgaagtattttacatggattttcttcattggagcagcgagggggatttgggatatcgttaagtaccgatgagacactagcttttttaattcgtacgtttgtattagggctgcatcagtacgagcaggctacataaattctattaatgctactaaacccgttaattgaaattgaaaaaaaagagaaagaatgatagattacaaataaagatatttattcctattgttttagggttgttactgatggagcaggcaaaacctaagctgcaaggacagaaaatgtagtttctgtttgttgctgtttaggtattttttgtttttgtttaaaataactagcccttttaatttattttataaaggggaaaatcttctgagaatggagagaaacaaatatgcttaattcaagaatgatcgtcatattacgagaactaatgtccatacagtctacattatcaaccgttacgagcgaatatttagcaacagtaaatcaagtatcttcgcgaactattcgaactgatataaaacagctggatgacattttgtctcagtacggtgccaaggttaaatcagctcgaggaacaggatacgaacttagcgttttagatgaaaaacagtttcatcagctattaaaagaactttcggctaatcaattgtttgatgcaacctctattccaacggttcctgatgaccgcgtgcattatttaatcaaaagattgctgttagcagacgaatatttgaagcttgaagatttagcagacgagttgtatattagcaaatcaacgattcaaaacgatttaagagacgtcaaaaaacagctgtgtaagtatgatattcttttagaaaaacgtcctaactatggcttgaaagctaaaggggacgaaatgaaaatgagattctgtatgtctgagtacatattcaaccgaaaagataaagaaatagatatggtatacaataaaatatctattctgccccaagaatcaatcttaacgattaaagcccacattttgaatcaaataaaacgatacaatattatggtttcagacattggattaaataatttaatcattcatttagctatagcttgtaagcgaatacaagaagaaaattttatctctttgtattcagaagatctgcttgagattatggagcataaagaatatgaagtggcagctgaaattgtgcgagagattgaaaatgcattcaagattcgttttccgaagtcagaaacggcatatatcgccattcatttgttaggtacaaaaatgctcaacaatagcaatcatgaagaaaaagaagtgaagcagtttattgacacacatatctatgaattaacagcagctatattagaagcaattgagaaagagcttcatttaggaattagtgaagattcagagctgatccttggcatgagcttgcatttgaaaccggctatcaatcgctataaatatggaatgaatctgcgaaacccgatgcttgaaggaattaagagtcattaccctctggcttttgaagctgggattatagctgggaaggttttgaaaaatcgccttgaaatcgacatgcatgaaacggaaattggctatttagctttacatattggaggggccattgaacgtcggaaaattatcaaccagcctaagcgctgtttgattgtatgcgcatcgggagtagggagtgccaagctattatcatataagctgcaggctacttttggattaaatctgactattttaggaacaacgcagtattataagcttcaccaaatgtcgctgcactctttagattttattgttagtacgattccaattccagatcatcttcctgttcctgtagtacaagtaagtacgattctaggaaacagtgattttaaaaaaattgactgtttaatgaagaacaaacagcagccttccttagaatacaccaaaaaagaattagtatatttacagcaagaatttcaaacgagagaagaagtgcttcattttttaggagagaaattaactcatctaggactagttccttctcaatttatagaatctgtttttgaaagagaagctgcatcaccaacaagttttggcaatctcgttgctattcctcatcctatggttcctcaaacggatacgacgttttgggccatttgtacgttaaaaaaaccaattatgtgggaaggaaacctcgtacaatttatttgccttttaagtgtaaaagcgaataatcaaggcgatttgcaaaagatgtacagtttgttagtccgcgttgtggatgataagcaggtcgtgcagcgcttagtaaagtgcaaggattatgaggaatttatagaggtgtttatgaaaaatattagataaaaaaagaagtctaagagaggggcttctttttttatctgaatgttcaaacataatttttccgctagtaacggaaaaaggttgtgtataaatgtaagcgcttttattttaagataaaactatcaacaaaacagatagcaaaataaaaaacgggggaatgacaaatgaatattctattatgttgtgcagctggaatgtctacaagtttactagtaacaaaaatggaaaaaagcgctcaggagcaaagcacggattataaaatttgggcggttcctggtgactctgttcgcaaccatattgatcaagcggatgtacttttattaggacctcaagtgcgctacctattgccgcagcttaagaagctaggtgaagaaaaaggagtgccagttgacgttataaatcctgttcactacggaacgtgtaatggagaacaagtgttaaaatttgcagttcaactagtttcaaaataggagtgtggactacatgagcaaatttaatagtatgcttgaaagcaaagtaatgcctatcgctggaaaaatggcgggtcaacgccatttacaagcacttcgagacggtattgttctgacaatgccgctcattattatcggttcagtatttttaatactgtcgaatttaccgataccaggttataacgatcttatggcagggattttcggaaaagaatgggcaacgaaaatggcctatccagttggagctacattcgatattatggcgctgcttgcttgtttcggaatagcctatcggttagctgaaaaatacggagtagatgctttgtccgcaggggctatttcacttgctgcttttttacttgctactccgtataaagtgtcctttctcccaagtggagccaaagaagctattttagtagacggcggaattccaaccgctttgatgggaagtaaaggactctttgtagcaatgattgtcgcgattctctctacggaaatttacagatggtttattcaaaaagacattatcatcaagatgcctgatggagttcctcccgctgttggaaaatcgtttgctgctcttattcctggctttacggtaatagcatttatttggattttacgtttgttagtagaacaaacgcattttggaagcctgcataatatcgttggagaattgcttggaaagcctttaggtgtgttaggcggcagtttaggcggtacgctagttgccgaacttgttattatgctcatgtggtcatgtggacttcatggagcgaatattgtcggtggaattatggctcccatttggtatggagctatggatgaaaaccgaattgcatttgctaatcatgaagcattaccaaatatttttacacagcagttctttgatatttggattaatatcggaggcagtggagcaacgttagctttagtcgttgcgatgattttaaaagcgcgcagtcaacaaatgaagcagcttggtaaattaggaatagggccagctctttttaatattaatgagccaatcatctttggacttccgatggtgatgaatccaatgatgcttattccgtttattattacccctcttgtgacggtagtagcaacctatattgcgatgtcgacaggactggtagcaaaaccagcaggtattgcggttccttggactatgcctccgattatttctggctatttggcaacaggagggaaattatcgggtgcagttatgcaagctattaatatcggaatttctgtttgcatttattatcctttctttagaatgtgggataaacaaaaattcactgaagaaaatggtatacagcctgcagctgaaggggtaccaagtgatacaaagaaagatattgtgtaaggagggataaaggatggaaagcattcaagaatatatttttaaattaatcttacacggtggaaacggcagaagttcagcaatggaagcgatagcagctgccaaaagcggaaatttttcagaagcacgtgaaaagcttacacaagctgcagaagaattaaatgctgctcatcatatccaaacgtcgttaattcaaggtgaaattagaggggaaagcacagaaatttctctgctcatgattcatgctcaagatcatttaatgaatgcgatgacggtaaaagaaatggctactgaatttgtagatttatatgaagcaatcaaaatttctggggggattacactatgaaaaaaggtattaagattgtaacgattggcggaggttcaagctatacgcctgaactaatagaaggatttattaaacgatacgatgaacttccagttcgtgaactgtggctagtagacgttgaagaaggaaaagaaaagctagagattgttggtgatttggcaaaacgaatggtgaaaaaatcaggtttgccaattgatgttcatttaacgttagatcgaagagaagcactaaaagatgcggatttcgtaacgactcaattccgagttggtttgttagatgcacgagcgaaagatgaaagaataccgcttaaatacggggtgcttggtcaagaaacaaatggaccgggcggattatttaaaggacttcgcacgattcccgttattttagatatctgccgtgacattgaagagttatgtccagaagcttggctgattaacttcacaaatcctgcaggtatggtaacagaagctgtgctccgctatagtaacattaaaaagattgtaggactttgtaatgtaccaatcggaatggaaatggggattgctaagctgcttgatgtagatcactctcgcattcgaattgattttgctggcttaaatcacatggtctatggattggatgtatatgtagatggtgtaagcgttaaagatcaagttattgatttattgagtgatccaactaacagcagctttgtgaaaaatgtagcgggacttggatgggagccagaatttacaaaagccctaaatgcgttaacgtgtccatatcacatgtactattataaaacgcgtgaaatggtagaaaaagagctcgttaattatgaaaaaggtgaaacgagagcagaagtcgtaaaacagttggaaaaagagctgttcgaactgtataaagatcctaatctagacattaaaccgcctcaattagaacagcgcggcggagcctattatagtgatgcagccgttcgattgattacatccatttacacggataaaggtgatattcagcccgtaaatactatcaataatggtgccatagcaagcattcctgctgattctgccgtagaagtaagctgtatcattacaaaagatggaccgaagccaatttcagtcggcgaccttcctgtacctgtgcgaggtcttgtccaaacaattaagtcatttgagcgtattgcagctgaagcagcagtgacaggagattatgataaagctattttagcattaaccattaatcctcttgtggcttctgataaactagctaagcaaattgtcgatgagatgctagaagctcataaagattacttgcctcaattttttaaaacggttcaagcttaaaatcaagctgtgcgaatacagtacgtattcgcacagtttttttctatttgtaaagctagatttctgccaccatcaatgtaacaatataaaatagaaacagacagcaaagggtggctagaaatgattcatttattaattatgatggtagaacgagtcggagttattgtcatcttaggttttttgctggcacatacaaaagtttttcggcaatttctccgcaaacagcaaggatataaaggaaaagctgtacttatttttattttttctctttttagcattattagtaactacacgggaattgaaattcaaggaacaattattcgaaatgaagacttattattaaaagtagatccatcaagctcgattgcaaatacacgaattatgggtgtggaaatgggcggtctgcttggcggtccatttgttggtttaggagtaggaatacttgctggcgttcatcgctttatgttaggagggagtacggcgtttagctgtgcagtttcatccgttttagcaggggtgttaactggatatatcggctatgcctaccggaaaaaacatcgaacgattacaccgcgctttgctgcacttgtaggcatagcgatggaaacgcttcagatgctgattattttattatttgctaaaccgtttgattcggcatggacgctagtgagtattattgctattccaatgattattgtaaatggcacgggaagctatattttcttatctattattcagtccattttacggcaagaggaacaaatgagagcgctccagacacacaaagtattattaatcgcggatcaaactcttccacattttcgtcagggtcttactagtgaatcatgtgaaaatgttgcaaatattattcatcgcttcacaggtacggatgctgtttcgctaactgatacgcacaaaattttagctcatgtaggggaaggaattgatcatcacgttccttcgcatagtttaattaccgggctgtctcacgaagtgctgaagacaggaaaaattatgaaagcaaaatcgagagaacaaattgattgtcagcataaagactgcccgcttcatgccgctattgtgatgccgcttacttctcacggtactaccattggaacactaaaaatgtactttaaagatgcgagcgggttaagccgagtggaggaagagctggcagaaggattagctaaacttttttcaactcagctagagctcggcgaagcagagcttcgaagtaaattgctaaaagatgcggagattaaagctttacaggctcaggtgaatcctcattttttatttaatgctattaatacgatatcggcgctgtgcagacaggatgtagaaaaagccagaaagctgcttttacagctaagcatttattttcgttccaatttgcaaggtgcaaggcagctgttgattccgttatcaaaagagcttgatcatgttcacgcgtacttatcgcttgaacaagccaggttccctaataaatacgaaattgacatgtatattgaagaagggctagatgatgtcttgcttccgccatttattcttcaagtgcttgtggaaaatgccattcggcacgcgtttccgcataaacaaaagcactgtcgagtagaagtttatattgagacaaaagataaatatgtatacgtaaaggtaaaagacaatggacaaggtatagacacaaaacgattgcaaatgcttggcaatcagcccgttttttcagaaaaaggaacggggacggctctttacaatattaaacaacgattgcacggattgtttggaaaagaaacaacgctggagtttgacgtaacagaaggaacagcggtttcgtttgttataccaattgaattaaaaagcgagggtatgtaatatgctgcgagtactaatagtagatgatgaaatgttagcgcgagatgaattaaaatatttattacatcgaacgaaagaagtagacttcattgaagaagctgaaagtatcgaagaggcgttggataaaatgatggatgaaaagccggatttattatttttagatatacaattgtcagatgacagcggttttgatattgctaaaaggcttaaaaaaatgaaaaatccgccagctattatatttgcaaccgcgtacgatcagtacgctttacaagcctttgaagtagatgcaattgattacattttgaagccttttgatgaagaaagagtggtgcaggccattcataaatataaaaaaatgcgtgttcctcatcccgctgtgaaagaagaagaatcgataggagagtcttcttctcaaactggaaagttagcgatttctgtagacgattcgattgtgttggtgaatataaaggacatcttgtttgtaggattaatagaaggagaagtcaccatccagactataacagaatcctaccatactgctgatacgctggctatgctagaaaaaaagctcccttctcagtcgtttagtcgtgtccacagagggtatatcgtcaacgtagatcatatttccgaagtacagccttggtttaattctacgtataatttagtaatgaaaaacgatgagcgagttcctgtcagccgtacatatgctaaagaattgaagaaacgtttaggaatttaaagaaaaaacagcttgcgtatgcattttggcaagcttttttttgcatttcaaggctcgatttttgtaagtgagcacaaatatttgactctttaatttgaaaacgctttcttgtcgattttcattttatataatgaagtcaacaaacagagagaggtgaaagaaatgagtgctaaaaaagtgtatggcttcttaacacaagcatttattttttccgtaattatgttgatttcagattttattgcagagcatttgccttttccaatgcctgcttcagtcattggacttgtgctgctatttcttgcactctgcttgaagattattaaactagagcaagttgaatcactgggaacggctttaacttctttgatcggatttttatttgtaccagcaggtatttctgttatgaattcattaggtattatgcagcagtacggcattcaaatttgtttagttatcatcgtggcaacgattattttgttaggcgttacaggcttattttcacagcttatacttggcatgacaaaagataataaagcaaaagaagaaataaaagatgtagatatgagtgaaaaaacgaaaaaacaaggtattgcttaacatcaattataaagagacaaggtggttggaaagatgaatccgtattttggaatcgtggtttctttagctgcgtacggcattggaacgtatttatttaaaaagtcaaaaggttttttcttatttactcctttatttgtggcaatggtactcggaattgcttttttgaaaattggtcatttttcttatgaggaatatagcagcggggggaagattatcagcttctttttagaaccggcaacaattgcttttgccatccctttatataagcaagccgataaattaaaaaagtactggtggcaaattctttcttctattgcggtagggtcagtttgttcggtagcgattatttttgcgattgctaaaggtattcatatggatgaagttgtgatgaaatcaatgcttccacaagcagctacaacagcgattgcgctgccattgtctcaagatattggagggattcctgctattacttcctttgctgttatttttaatgcagtcatcgtatatgcgctgggcgctttatttttaaaagtattcaaggtgaagaatccaatttcgaaaggattagctcttggaacttctgggcatgcgctaggagtagccgtagggattgaaatgggagaagtagaggcagctatggcaagtattgcagttgttattgtaggcgtcgtcacagttgccgttattccactttttgttcagctagtcatgtaacaaaagcctgaaggagtcagagattttctgactccttcaggcttttgtttgttaattaatacaccactccaaaatgtcgtgatgcgcagttttgacaggttgtatggtcaaaaagactctcaggaatgataaattcaaaacaaaattgacattgtttgaattgactttgtctataaaacattgtctccaagaaaatagctgtaatatgttcggttatgtgcttatgggaacgttgttctaaagtggaccatggaatagactgatgctctatgtaaatcggacaggaagtatagggtgtatcccattgaatggcttgatatccaaacgtaaggccatgatgagctgctgatgtaaatatgattaggttttgatggaattctggcagaggtaattctagtttttgatctttaagcgatctcgttttggaatgaaggttatacaatttaatttgaaaatgaatccactgagtggcgtgaacggttattgacatgttttaaacctccaattcagactctttttttatcataattgatttcaaaataaataaacagtaggcaaaaagaagataacaaaattttatatagattacttataaggcgtagggaaaggtgatataagcatagcatccttttttctacccctttttaaagcatattaatcttctatataaaagcttgctttcaacgaatgatatcggcgtattcataagctttaaacagattttaatgttagaagttataacaaggttcatttcttttagagaagtttatgaaataataaaaactgtatattttacggtctgaatctatgtgttggaggtttttatatgacgaaacaaaagctaatattaatcggaaatggaatggcaggaatgcgctgtattgaagaaattcttattcattctccagattgttttgatattactgtttttggaagtgagcctcacgttaactataatcgaattttattatcaaccgttttacaaggcagtacaaagcttgaagatatcaatattcattctttagcatggtataaggaaaataatattactttatttaaaggagaaagcgttacgcacatagacaccaagagaaaaataataaaaacagataaaaacagagagacgatgtacgacaagcttattcttgctactggttcgagcccgtatatgctccccgttaaagggtctgacaaagaaggtgtcctcggttttcgtaccatcgaagactgtcaggaaatgattaaaatttctaaacagtataaaaaagcagcggttattggagggggtctgttagggctggaagctgctagaggactattaaatttgggaatggatgttcaagtcattcatcattcgggtttcttaatggagcgacagttagacagagcagcatctgctatgttaagagaagaattagaaaagcaaggcatgagttttctattaaacaaacatacggatgagattatagggggaaatcgagcagaaggcgtccgatttaacgatagcagcaaaattgcagctgatttagttgtaatggctacaggagtgaggccaaatgttaatctagctaaaaaaagtggaatagaaacaaatagagcaatcatcgtaaatgattatttagaaacgagcaccccggatatctatgcagtaggtgaatgcgcggaacatcgagggatgacatacggccttgttgctcctctttacgaacaaggaaaagtcttagcacgacacctttgccaaataaaaaacgatggttatcgcgggtccgttctttccactcaattaaaaatatcaggaatagacgtttactcagtcggagagttcaaggaaaatcaaggtacaaaagccattacgatttcgaatatgttagatggtatatacaaaaaagtcgtttttcgcaaggggaaaatagtgggagctgttctttttggagataccagtgaggctataaagctatcacaaatgattaatgaaaaaaaggatttgtcgcaagcggaaaaagtacaattatttccttctcaacatgaaaaagagaatgcagtaacttctatgccacttacagatattgtatgcaactgtaacggtgtaacaaagggagccattattgaagcagtacagaaaaatgatttaacgacagtggatgaaataaaaaattgcacgaaagcttctggttcatgcggaggatgcaaaccccttgtaacagatcttttaacatatattcaaagcgatgagtttgatgaaatcattgaacaaaaaaccttttgtacatgtacacatttatcagaagatgagctggtaagagaaatgcagcaatatcaatttgagacggttcagcaagtaagagaaatattaaagtttaaagacatgaaaggctgttcgttatgtgaaggcggtcttcattactatttagatatgatgaatcctcattatgaaaacaatcgacattctttatttactacagagaatgaacaggccgttttgcttcacgatgggacttatgcagtggtaccgcaaattcacggtggtctgacaaatgtacaggaattaaggaacatagcaaatgtagctgaaaggtacaacatctctaatattcgtttaacaagtgatcagcgcattcaacttattggagtgaaaaaagaatatcttccgttggtaagtgaggaaatagatagaggacttcagcagctatatgaacgtacagttaaaaatgtatctgtttatataggaaaaggaacgtgtatttgtcagtatgaacctgctcttgctttatcaaatgaattagataaacagcttgaatatgtaaagaccccatgtgatatcaaaatcagtattgcttcgtgttctcacattgcagagaatgtaacaacaagtgatataggattaagaagaatagacagaggatgggaaatatatgtcggcggaagcagcgcagaagccagaagcggggagctgttttatgtggccgaaacgaacgaagaagcagtagaaatcagctgttctttgattcaatattaccgtgaaacggggaactatttggaaaccgtcgggagctggatcgagcgagtaggaattgttcatgtcagagaagttttgtttgaggtagacaatcgagagtatttaatgaagcagctcagttcagagcgctctcgtgcaatcacatatttattataggaaagaagggtgacctacgatgactgagatgctattgaaatattttcgtgagcagcaaaagcaagttgaaaccgagcgtatctataatactcagtgtccttactgcagcatgcagtgcaaaatgcagctagttgaacaaacacatgtaaaaaggaaaacgtataaaacaattggaacagacaaccctacttctcaaggaaggttatgtatcaaaggaatgaatgcgcatcagcatcctttgcataaagatcggattcaatatcctttattaaaagtaaacggagagtttgtaaagatttcttggaaagaagctcttcactatattaaggaaaacgttgcagagattcaagagaagaatggagcagatgcgctaggtgtttatggaagtgcctctattacaaatgaagaagcttacttattagggaaatttgctcgagttgcgttaaaaacaaagtatattgattacaatggacgcttatgtatgtcggctgctgcttctgctgctagtaaaacatttggcatggaccgaggatttacgaatagcttgcaggagattccgtttactgaatgtattatgttagctggaacaaatattgcggaatgtcagccaacgattatgccttattttgagaaagcaaaagaaaacggagcctttattattgcaattgatccaagagaaaccgctacaactaaaatagctgatttacacttgaaacttaagccggggagcgatgcggcattagccaatggaatcttgaagatccttatcgaagaaaattatctagatgaacgatttctacaagaacgtgtcaatggatttgaagaagtaattcaatatgtggcgtctctagaatttaatatcattgaagaaataacgggagtgccacttgaagagatgtaccaagctgcccgtatgtttggtcaaagaaaaacgggaatgatttttactgctagaggggtagagcagcaaacagacggaagtgctgcggtgcagaattttttgaatattctactttctgttgggaaaatcggtaaacctcgctgcggatatggggctattaccggtcaaggaaatgggcaaggagcccgggagcatggtcaaaaagcggatcagcttccaggctaccgttcaatcgaaaatcatgagcaccggatgtatatagcagatgtgtggaacatagaggagaaagatcttcctagaaaaggtgtttctgcatatgagatgattgaaaaaattcatgatggtgagattaaagggctgtttttgatgtgttcaaatccaacagtttcaaatccaaatgctaattttgttaagaaggcttttgaaaagcttgaatttctagtggtagcagatatgtttgaatcagaaacggcaaaattagcaaacttgatcttaccagcatcttcctacttggaagatgaaggaaccatgacaaatgtagagggaagagttacattacgcgaagctagctttccatgcggcggcgaaatcaaacacgactgggaaatactatgtgaaattgctaaagctttagggaaagaggagcatttttcattttcatcagctgaagaaatatttaatgaactgcgaatagcaagtaaaggagggatcgcggattactctggtattacgtacgaacgattacgagaggaaaaaggaattttatggccatgcagaagcttaacagataaaggaaccgagcgcctgtttgaaacgcgttttgctcatagtgatggaaaagcgatgatggtccctgtctcgaatcaagctattgtacctaaagcaaaaataacggaaaaatatcctctctatttaacaacggggagagtgatgtcgcactatttaacgggtgtgcaaacgcgaaaaagtgcgtctttatctgctagaaatttcgaatcttttatggaaatccacccgttaacagcgaaaaaatatgaaattttgaatcaagaattagtacaaattgaatcttcatatggaaggattgtggtaagaagcaaattttcagagggcattcggccagataccgtatttgttccttttcactgggcggattctcaaaatgttaataaccttgtttctgagaaattagatcccgcctgtaagatgccggggtttaaagtaagtgctgtgaagattagcccttctgtaaaaagaaacagctattaaaaatgctgatgcaaaaagcctcttgaaaaaagaggctttttgcatggaatcaggcaaggtgcttttggttaatacgtacattttgttttttgaatccagaataatttagtaagagacagaatagggcaaaaagcgctagtaaggaaaaaccaacaacgtaatctccgcttgtatcttttataaagcctagcacaatagggggaaagaagccgcctactcctccgaatgctcctacgatcccggtaacagctccaatatttcctgttgaaacagatggaaccattttaaaaacagctccatttccgataccaagagtaatggctgcaagtaaacaacctacgctaaatagggagaaggcagtgatggtaaatgcaataaataaccctattagtagcattgcggtaaagacgaaggtgagtactttttttgctccgaagacatccgataaatatcctccaagaggccgtacaaacgttgctagcacaacaaatacagctgttttcagtccactgtctacagttgaagcgttaaattgatcatgcaaaatggtaggaagatagatgctgaacgttacaaatccaccaaatgttaaaaaatagaaaatggataaaaaccacgtttctttaaattttaataccgataaagattcctgcagcgttttgggggaagcaacagaagggtggtctgaagttcctacccataataaaagagccattaaggctaccgcaattgctaaactccaaaatacccaaggcaagccaaaagaaaaaaagataagtggaatactaaagcttgctaccgccgatcctaagttgcccatcccagcaattcctaaaataaaaccttgcttttgaggtgaataccatttagagacataggtaatggaaatagcaaatgttgttccagccatgccgataaaaaatgcccaaaagagcagcatagaataagaatgagtaaagcctgcacaaatggtagggagtaaaagagccagcatagtcaaagaatagacttttcttcccccgaagcgatctgttaaaatccccatcgggattcgcatgagggaacctaataagacgggagtggcaattaagacacttttttcagcattggttaatgaatacattacttgaatatctgcagcgataggtgcgaagacagaccatactgaaaaagcaataatcatagataaagtcgagataagaagtacagataagggccgtttagaaaacattacttaaaaacctccttttttatatccagcgtaaagctgttgcaatatggtaattatgatactacgctttctttcttatgtatcattctgtgttaggttttcttccgtacttttactgaagagcggacccagataaaagtggagagataacttagacttacacttacacttagacttacacttacacttacactctatctaagtgctgatgaagaaacggttaaaaagctttgaaagaaacagtaagtagaaatattgtcgaaagaatggaaggaaaattgaaattagaagagattaatagagtaagcatctataaatttgtgctatcgaattatagcgaaataaaaaataattcatattttatatagaacacaaatttttgaaatagaaggtggaaaaagtgacagaaaagcatcctctttcaggttataaaaaggatgataatggagttctctggatatggagttacgttggacaggctagagtgaaaatggggtataaagtaaaaagtctgcttcactatgagcaatcttcctatcaacaaatcagtattgtggatacaaaatggtatgggaaaatgttggtgctagatggtactccacaaatttcaacaggagaagggtttatttataatgaaatgattagccatgtgccgattataacgcattcaaatcctaaaaaagttgcgatgattggcggaggagactgtggtcctgcacgggaggccatgaagtatgacggaattcaacaaattgatgtagtcgaaatcgatccaaaagttacagaaatctgccgcacatggctaactccggcttcttgttatgatggtgaaactaggctcaatatgatacatcgcgatggaatagattggattcaagaacaaaagggagtttatgatgttctcataattgatcggcctgaccctgttggaccgggaaaaaaactatttcaacctgatttttatcaatatgtctacaacagccttaaggatgatggcgtggttgtttttcaatcaggatctccttactacaatacttctacattacaaggcacaattaaaaatttaaaggagctatttccaattgtccgcacatatttagtgactatacctcttttcccttgcggcatttggagttttacgattgcttctaaaaaaatggatcctcttcaggccgatttgacgaagctacagcatacagatactcaatatattgatcctgaaattttccgtgcatcatttgttttacctaaatatataaaagaaatagtagacggaaaagattcctaaaaactaagtagcgacgaatgtttgttgaaagtcatcaataatctcggaaaatatcttcgttatagtagttctgtgtttgctgcgcagagtccgggataattcaatttgaaatgtattaaaattatgactgtaacctagatagccgctattgtcaccttgtctgtgaaaggcaattgattcgtttccaacaaatttattatcaaatattacatggattttcgggaacgaatcttcagattttttagtcagctcctgttggaaccaatctttaacttcctttgagcaagattgtccatataaagtccccacttcaattgcatgaggcccgtaatgtgtgtccttcattccatgaaaagataaatgcaaatagggtgttaaaaggaaattattactatctattatttttaaagatttaataatttctttgattgtgcttctatattcatgtatcccctcatggtttgtttcatttagatttctatttaaatctgctatggttctggaaatcgtactaacgattcctgcacatcctgttttcttgactaaattttctacaattttatccgtaaataaatcagcagcgggtggttctgcatgaagtgcatccacgtgacagcttataaaaccagttcctttgttgtattttaagtagtttccatgaatgaattttaatgtcattgactatttctccttttatatcgtttgaaatctatcctttctataataaatgcagtaaaaataaaatcggtgaattattacacgtgttaaatacatacataaaaagtttttagagatggtggaaataaatagataaatgtacaggagtattttgtatagttacatactataggagtagctgattattgttatagggcattaaagtagcaaaatacgatagaaagttctaattaggaggctttaaaatggatccaatgagagaagagttagggatattatctgataaagaaatgacgttgcaaactcttaatctgaataatgtaccgtctgttgaattagttgaccccaaaacctgttcatatccagtgatagggaggaagtatggtcaccatagcggaagagatattgtcatcgtaaatacaaaggatcaagcaatatatgaaggatatgattattttacgaaaatgtatgcaatagacaaagaatatttcctagaagtggaagggctgaacgtaaaatcagtacaagtagttactagtgaacacgttgtatttaatgaaatacccattcgaacaaaagccttcggctggaaattagaacggataaacagcatggatgtaccggaaatgttggtaagcatagccattcgagcgctttatgtaacgggagctaaaagcggctttgtcaaaatgggggtattagaaaatggagagtgtatcgtcacagatattaactcatcagaaagtgaatggatagaaaatccattaaagcctagtgttctttttagcatgggtgctgacgttgagtttatgttaagttgtgatggagagcttctaccagcttctacttttttttctgttgaaggtccgataggctgtgatgaaagacaaatagagcaagatagcggtgagtatgcattagtagaagttaggcctgaaaaagcgaattcatcaacagaactatttgagaatattcaaaaattaatagaaaaagcatctgcacaggtaccatatgaaaatattcattttcgggcaggcagcatgccgttttcagggtatcaatgtggaggacatattcattttggcattccgctttctttatccttattaagagctcttgaccactaccttgctattcccgtagcgctgatagaagaatctaagaccgctaaactcagacggaagacgaaccatggaggccttggacgctatcgtgagaaaccgtatggatttgagtatttaactttaagctcttggattatcgaccctagaattactctctccactttagctcttgctcagctagttgctacccatcatcatgaattaaaaagcgaatttttatttcatccacttacgcagcgtgcctactatcaagggaataaaatctttcttaaacgaatgtggaaagatatcaaggccaatcttatgaaaacatccagctatccacactatcaaaatgaactatcttttctatttgaaatgatagaaaaagaaattccttgtgatgaatcaaaggatattcgtaggaattggaatgtaaagatttctaaagaaatctatgaccgcggacatattattcaaatccccaaaaagctccgtttaaaatacggcctcaaagaggggcagtctacgattgttagtgcaggaaaggcaatatcaactgcaactgttcattcttatcctttttcatttcgccatccaaatatggttcaactctctaaatctctccgtgataaactatctctcccgaaagattggtgccccaagctatcagcttcagaaggcatcataactttaggtcctatcattggcattcttgctaaccgtccttttgaaagacaaacaacctatttccatcatctatgtcgcttagcaactgaaaagcgaatgcttgtatatgtgtttgaacccgaagatattgattgggagaaaaaattggttaaaggaacaaccattaacggtgaagggctttttccttttcctgctgttatttatgaccgttatttcatagatggtagaaagaatattttaatagatgaagtaagggcaaaactccaggcgatttataaaattccttttgttaattcttcaaatttgtttcagcttacgggagataagtgggcaacatatgaacttcttatgaaagaatatgaagaatttcttccagagtcacgtctcgtacaaaattctgctgacattgcagaaatgcttgatagctatggagaagtttatttaaaaccgcttggcggagccttaagtaaaggagtcatgcgtatcgttcgccgaccaacaggcatcttttggttcgatcttaataaaaaagagctgcatcaattcagtaatatggaagaattatttactttgctctctcctttgatgaaaaacaatccttatcttgttcaagaaggaattcgcagaaaacagcataaagataaaaatttggaaatacgggtttatatgcaaaaaaatgaaaagcaaatttggcttcgaacgggtatggttgcgcgtctcaccggtgaagatgtgctaacggaagattctgaaacgaatatgcgcctcagcaaaatattaaacagtttatatcctgatccaacagacagaaggctcattataaaccaattagctaaaatatctaaaaatattgttgcaacagtagaggagaaagtaggtccttttggggagctggcggtagatttatgtatagatcagtacggttccataaagttacttgaaataaatgcaaaaccagatagtctattctcacaaattagagcctacaagctgcgtactttggcggggattcgtctgcttaattatgcgtcttcactggctggttacgaagaagaaaaggaggatgtaacatgaagcacttcacattaaatgaaatccttaaacaaacggggggagacctttgttatggatcaggaaatcctgttattaaacatgctataaactacgctaaaaaggatatagaggatcatacactcatctttcatttagatagagaaccgattagagggaagtattggaaagaaaatcattcaattgtcgttataacagatcaccctgagctgtgcacgaacttagagggaaatattattcttgttaaaacagctcaattagaagaggcttattggaaatttatcgaatactaccgagggctttttgatcttcctgttattggtgttacaggaacttgtggaaaaacgaccacaaaagagatgatccgacaaatattaattgaagattataaagtgaaagctacgtggatgagtatgaattctatgtctgtaaatctacgttatttaacaggtattgatgatacgacagaagtagctgtttttgaaatgcctgtcgcttatccgggctatttaaaagttgcgtgtcgctactttcagccacaaatacgaattctattaaatataggcgtgcaccatctcgctgattgtgaaacacctgaagaatatatgaaagcaaaagccgaaattgtagaaggcttagatccaaacagcggcattttgattttaaacgcagatgatgaaaatattaagagagtgcttgatgttaggcaccttcaaaatgttgtatatataggtaaaaatggtagttcccaatttcaagcaaaagatattaaatatgctaatggaggaatggcttttactttaaagtaccaaaacacagaatacgatgcttttatccctggatatggtgaacataatgtgtataatgcactggctgccattgctgcagtattttatgtgggcgttgatatttccgttgccatacaaagacttagcttgtttgaacaagtagaagaacatttggaatttaaaagaggaatgaatgaatgtacggtaattaatgatacatggaactcttcacctttatcgatggctacagctcttggagttcttagtgatatgtcaaaagagaaacaatctattgctttattaggttacatgcctcagctaggagaaggaccttatgcaattaaacaatatgaagatatgggaaaaaaagcagcggaatcaaagattgatattttagtggtagtaggagaagaagcaaaagctattgggacaggagctttaaaatgtggaatggaccctaataaagtctatttttgtaagactggtgatgaagtatacaatgtgctagcgccatatttaaatgaaaatacaatgattttattaaaagtaacgcaccgtgttatgacaaaacctacttttaaggaattaagaaataaacttattccagacaacgaagagtaaaaggaggatagacatgaagaagactaaacagctaagagagttgatagaaagtaaacagctagagtttattatggaggctcacagtgcgctatctgcaaagattgtagaagaagcagggttcaaagggatatgggccagcggcctatcattatctgcagcactgggtgtaagagataataatgaggcttcatggacacaggtattagacatcttagagtttatgagtgacgcaacgtccattccaattcttctagatggtgatacaggctatgggaactttaataatgcaagaagattagttaagaaattggagcagcgagacattccaggcgtatgtattgaagataaattgtttccaaaaacaaactcatttattaaaggtgaagcacagccgcttgcagatattaatgaattttgcggcaaaatcaaagcaatgaaagatagccaaaatgacgaagattttgtagtggtatcgcgtgtagaagcttttattgcagggtgggggctgaaggaagctttaaaacgtgcagaagcttatcgccaagcgggaaccgacgccgttttgattcatagtaaaaggtcagatatgacagagattgaagcttttatgaaagagtggggaaacaggcttccggttattattgttccaaccaaatattattcagttccaactgataaatttagtgatttaggaattagcttgagcatttgggccaaccataacttaagatcttccattacagctatgcaaaaaacgtccgctcagatttattacgataaaagcttgattaacgtagaaaaaaatgtctctccgcttgaggaagttttccgtcttcaaaaagctgaagagctagacatcgcagagaaactttatttaagctctgccaaccatagcatgaacgctatgattctggtaaaagaatcagcaaatgaagctttgataactgagcagataaatcagttaaaaaaagtcggcgtgacaaatagtataaaagtaggttccgacaaagctatggaagataaggcgtttcctaataaaggggaattatatcatctctatgctgcaagagataagttaggaacggctactttaataagcgatagtaacatcgtatataaaacacatgtttttgaggagttaattcatgaaagtggcgatatcactattgtagcaggagctgattatgagttaaaagggaatcaaacatcttatgtaactgctaaacttccctattccaagcagctgtattccaaaacagtagacttgattcaaatgtcgcgcaatccaaactctaacaacattcacggtgaattcattggtctttggaaagtttccgcaaaaggcactgaggttgtaaaaaaagctttggaagaactggcgcaaagaaaagattttgctcagctcacgttttctgatttctttaattatgttaatctaattcacccggttgctgttaaatatacaatggggtcatggatagataccgaaacgtatacaaagattcaaaaagatggtgggaaaaatgattagtacgtccgtatttggaactcaattaaaaaaactaggttttcaattttatagcggggttccttgttcctatcttaaacatcttattaactatgctatcaacgaatgtgaatatgttgcagcagcaaacgaaggagaagcggtagcgattgctgctggcgcatcaattgctggcaacaaagcagttgttttaatgcagaactccggattagcaaatgctgtttcccctttaacctctcttattcatccgtttaaaattcctgtccttggatttgtcagttttcgcggagaacctggatgtccagatgaaccgcagcatgaattaatgggagaaattactcctgccctgctaaatacgatgaaaataaaatgggaatatttttcttttgattttgcggaagttaaaaaacaattacagcgggctaatcaagctattgaaaataatgaaagctacttctttattgtaaaaaaaggaacgtttgagccagttaagcttttagaaaaatcaatgaaaaacattactcctaaaatgagaagtgaacagataacaaccgacgagttaccttcaaggtatgaggcattacaagtagttaattcattaaaagacaacgatactattcaattggccgctacaggaaaaacaggaagagagctttacgaaatagaagacgcaagaaataatttttatatggttggatctatggggtgcgttagttccattggtttaggcttagctttgagcagaaatgaaaagaacatcattacaattgatggagacggagcgttgcttatgcgcatgggaaatctagcaaccaacggatactactgtccagcaaatttattacacattcttttagacaatcaaacccatgattctacagggggacaacatacggtctctcataacattaatttcgtagatattgcttcttcctgtgggtatcaaaattctattcatgttcataacttacatgagttagagacgtatatcaaacagtggaaaagtgataaaaaattaacgtttttatatcttaaaatagcgaaaggatctaaaaagaacctggggcgtcctgaaatgaagccttatgaagtcaaagaaagactgcaggtgtttttagatgattaaaacagctgttattctagctgcagggatggggagcaggattcgtaaaagagctggaaaccgccctaaaggttttttgatgattgatgaaaaatcgattattgaacattccatttcgaagttaataaaagcaggagtcaagacgatttttattggaacaggatatatgaaagaagaatatgaaaagctaatggttagatatcctcaaataaaatgtgtttataattctagatacgaaacaacgggaagcctgtttacgctgtatcaatttaaaaattatattaaagaagattttttactattggaatcagatgtaatttatgaaaagaatgcgttggaaacattagtaaaccactcgagatcagatgtcatactagcaagtaagttgaacggtgctggcgatgaagtttatattgaagctgatgaaaataataaccttaagaatatgtcaaaacaaaaagaagagttgaatagtatctatgcagaactagttggtttaaccaaactctcttatgctacatttcagagactttgtgatgaagcaaatacgctgttccagtttaatcaaacgatcgattatgaatatggcctcgttaaaatttccgaaaaagcaaatgtgtatgttcataaactggataatttggcatggtgtgaagtggatgatgaagatcactgggcaagagcaactgctattgtttatccgattattaaagctcgagaaggtattacgcatccagttaagagaagtatactcctaaaccccggaccggcaactacaacagataccgtcaaatatgctcaaatagtggaagacatttgcccgagagaaaaagaatttggagagacgatggaatttatctctgctgaactaacaaaatttgtggggaatccagaaaagtatactacggtattattcggcggatctggaacggcggcagtggaatcgattttaagttcagtaattgataacggtacggttgttattatcaataatggtccatacggtgaaagaatgtgtaaaatcgctgaaatttatggactgaattatttagaatataaaagctccgccgagcaggctattgatatgaacaacttagaaatttttataaaaaagatttcaacgaacgtttcttatctggcgcttgttcactgtgaaacttccacggggcttcttaatgatattggaaaaattggggaattttgtgcagtgaaaaatatcgaaatgattgtggatgcaatgagttcgtatgcagctgttccaattgacatgcaaaaaatgaatataagctatctggccgcaagtgcaaataagaaccttcaaggaatggcaggcgtgtcgtttgttatagcaaataaagaccggttagaaaaaacggagcaaataaagcctcgtaacctttatcttcatttatatgatcagtatcgatatttccaaatgaataaacaattgcgttttactcctcctgttcagactatgtacgccttaaagcaggcaattatagaaactcagtgggaaggaattgagaaacgatatgaacgctactcaaaatcatggactactttaacggatggaattactcaacttgggttaacctatttggttcctgaaacacatcattctaaaattattacctctatcctcgagccttccgataaaaagtataattttgatattatgcatgattttttttataaacaaggattcaccatttatcctgggaaaattgataaattagaaacgtttcgaatagcaaatattggtgatatcacatatagagatatagaaagatttcttcatcttcttgaacaatatcttaacggtctaaaaggagagtgagaaaaagttgaatcaaaaattagctgtagcagttatggtggtaaatcaagatcatcacgtgcttctagtcaagaaccatagacggggatgggaatttccaggcggttttgttgaagcaggtgaatcaataaaagatgcggggatacgagaagttaaagaagaatctggaattgttattgaagtgaccaactttctaggagtagaacaagatgttaaacgatctactactgttattttattaaagggaaaagcgattagcggagaaatttctgtctccaatgaaacgcaggatgtgggatattttacgttagaggaagcaaaaaatataattaaattagataactttaaggatcgaatggctagatgtctaaaagagactgaaataccatttttctatgttttaaaagacacaggctctttttacgtataggcggaaggttttctgtgttgtgctagaaatgaagcctgaacgcgattaaataaaaaatgctcatcgtcatgcatgacgatgagcatttttttatcagtaaaagtatcgttgtttattcagccgtcgcaatttcttcttctacatcatggtcttctaaattagcatttaaaaattcacttgtttccgataaattgagatttaatttcgtttttttgcagatttgaattgtaacatcctgaacagagatatctaaaacatgtcccccttcttttttatattcatcaataaagtgcaggtggtagcctggaacaccgatgcctgaagaatattctggcgtataaaaacctgctagggttccatttacatctaaaaatgtaaatgtaggctgatcagcagccgcatctaccatagaaggatagggcttctcttgctttgcaaccgtgcgcgtttttacttccttaaacttcccgtcaatgcgaactgcatagaataaattcgggctaggaataagctcgttcattaaggtttctagttgttcacgattcatttccttttctacacgataagagatatcttcataaaaggttgtcataatggcaaaaggtgtttttgcatcttcgccaataggcgcggctttcccatcagcaatatgataaaattctccgtcaaaggcaatcatttcaccgtccaattgattaaacgtaccgatgccgaaatcacctttcttagctaaatccttgtatgtgacaacaccgtcaaatactccgtctaataaagcgatcatggtggaagtttggtgaatcgttaatttttctttattgctcattctttactcagtcctttcagttaatttgatctggcagtagctgtgtatttaatttttcattatctttataatctacaggaacatcgatgataactgggccttgttcacgaaaagcgcttgctagagtgtccggaaattcttctggcgagttaactctaaatcctttggcaccaaaactttcagcaagcgtaataaagtctacactgccaaactctactgcagattttcgaccatatttaatctgctgttgaaagccaaccatatcgtaggtttgatcgttccagataatgtgaacaattggtaagtttaatcgaacggctgtctcgagctccatagctgaaaataaaaacccgccatctccagacatggacagaacttttttatgggggcgaacgagtgcagctgaaatagcccaaggcaaagcaacacctagtgtctgcataccgttgctgaatagtaaatgctgaggttcataggaacgaaaataacgagccatccatatgtaatgcgaaccaacgtcacaggtgatggtagtatcatcttcaacaaagttctgcagagcttcaattaattgtaggggatgaaggtgagtgtcattagaaaactcgtactgatcgtcaggttgctcaagtttactttttagcgtttttaaaaaagaagcactttcttttgaacgtattaaatgtgggagtttatccgctaatatgtcaattgtgcttggaatatcccctactaactcaatttccggctgataatggtggtcagcttgtgcttgtaaatcatctaaatgaataatgcttctttgactttctgagttccaaagagaaggagggtattcaactgggtcatatccgattgttaagacgacgtcagcatgcttcaataagacgtctccaggctgattgcgaaaaagacctactcgcccaaaaaagtgagtttcaagctctcttgaaacagctcccgcaccttggaacgtttccaccacaggaaggtcatgttctgctataagttgacggattgattccactgctttagatttacttgctctcatacctaaaagcaagacaggtagttttgctgtgcgaatagtgtgtatagcttgggcaacagcgtctaaattggcagtcccaatcgtaggagcttttaaaacggatagagtggaagctgatgtttcgctatccattacatcctgcggcaagctgacaaaagatgctcctgaaggagaagaaacagcttcgcgaaaggcgtctgttatcacttctggaacgtttgcagcgtcttctacctcaacgctgaatttggcgatagatttaaatagtccttcattatccattgattgatgcgtcttttttaatcgatctgctcttggaacggctcctgctagggctaccactgggtcaccttcagaagtagcagtcacaaggccagtggctaagttagcggcacctggacctgatgtgacaaggcaaacgcccggcgtacctgtcagtcttcccatagcagctgccataaacgcagcattttgttcatggcggcaaacaattacttctggtcctttttctttcaaaatatcaaatacgccatcaattttggctcctggaatgccaaaaatataaggcacattctgacttgccaaactttctactagtaagtcagcgcctttttttgtttcggcagtatcagcattactcatcatgcattctctcctttatgtttcttagataggttttaaggcctactgattggatacccaatttgtatgacaactaacctaaggaaaggagaaggttttaattttctaaataaaaaacttccctattaattagggaagcagagatgtacctattgcgaataaaacatatctgttttatttgtaggtttatggtacttgagggatagcaagtgaaagtccaacgcggctcttatttggtatggttaaaaagcttttggtaactaacaattttttgatctagcttttgacttaattttaaaatctcaccgtgagaatagctgcttgtttttttagctaattggtaaatatctgattgtaaggctcgaatttctttttctaactgaggttgcttcattgaaatcctctccaagtcagaatacttctatcttctatgttttatcttttatctaatagtatgaaattccttcatatttgtaaaatgttttttgttttgaaaaatatgacataggtgaagagctgctaacaagctttgtcgaacactttttttacctgttttcaataagtatgatatactgaggctaggaaaaatgacaatctggagcgcacgttcagttattcttaacaagcgaatgaattcttagctttgacaagtgtaacttgtaaggtgaagaaattcatcacataatcttattagatctgaaccttgttagcctggatgaggatttgtcgaaaacgattcactagaaaaaaccttcgagaccgccaactcggaggtttttttatttttgtgtatgggaagtgaaaaaaagacatagactaataaagaaaaaggtcccgcacccataatcggccgtagttgattacaccttgtccatttctgcaaggaagctgtctttttactatagggaagtgccgccaaacacgattccctaaagacaatcagcacacgagccttatggatgaagaaccttttagacgatacttaccggtgattacttattttactactggaaaaatagcaaaataagagcgactatggctcctaaaagctctacgtaagccgttaggagctgaacattctcagcatctaggaaaaatgacttgaggattcgtctcagactatccaccacctttttcttccttgcgtgaattcccaagggaaagaaaggggacgacagtgcttctttattttaacaaaagtaggaaatgataagtagatttatttgaagtgtaaattaaaaaagcatgtagaatacatgcttttttaatttgggtaaatttcttttatgcgtccgacttgtccatctgttaaacggactttgatgccgtgtgggtgaaagcttgaattggtcagaatgtctttgaccgttccgtgtgtaagttttccagaacgctgatctgcttttaaaacaatgtcgacttcaattccaggagctacgtcttttctattttgtccgttcattatacacctgttctctttcgctgattattcgttttttttgtttgttgactcgtcagctttttggttgcttgattggtgctgctattttgagctttacttgaagattgatttttcttattagcaagctgctgtttgatagcatcttgaagactaattttctttttaagttgttctgtcatatgggttcctcctgaatatatacatcatctgaaaaaacaaagaaagtaagggaatgaaaaagctgactagatagtcagctttttttaattagaaacagtgacttcttctacaggctgcataagtacagcttctttatcaggatacgttttttcaatatgatgttctccccaagagcataatgaatcaagaatgctttttaaagaccatccgtaatctgttaaagagtattctactcgaggcggcatttcattgtacatttttctaacaatgatgccgtctgcttcaagttctcgaagctgctgcgttaatactttttgcgtaacgcgcggcataattctttttaattctccagggcgctttgtccctttaattaagtggcaaagaataacgactttccacttgcctccaatgacttctagtgccgcttccactggaatattatattttttcacgttaacaactctccttgttctagagataacggtcaaatgcatgttttcgcattttttctgatgtttatcatatcactatagagcaaaattttctaggtgtaagcatttttttagaatacccaatagttcatgactttagtatttacgcttattgtaacctccaggtgcctatatcacttgaaagtgcgtactttttctttggttttacatcgctcataataacaattgttgatggcgagttagcgaatatatgaaaggtacctaagctaattagccgtaagagaagctattatgaagaagttatcataacgaacaggaggcgttaagaagtgaacacactttcacaaacacaacaaagtaaaaaaagcggttctttgccgctattagcgctagctattagcgcctttggaatcgggactacagagtttgttccagtaggtttattatcatcgcttgcagatgatttaaatatttccattacactagcagggttattaatttcaggatacgcaatgggagttgcatttggagctcccgtattaacagctttaacaagtaaaatgagcagaaaatcactgttgatgctattgatggttatttttatcgtaggaaactcagtagcagctttatcaacaagctttgggctgctgcttatagcacgaattattactgcattttcacacgggattttcttttctatcggtgcgactatcgctgctgatttagtgccagaagataagcgagcaagtgccattgctttaatgtttacaggtttaacagttgcaactgttacaggtgttccgcttggtacatttattggacaagctttcggctggagagcaacattttggggagtagcgttccttggggttattgccattattgcaagtgctcttttagtgcctaaaaacttaaaggaagcgccgccggcaaagtttagtgatcaattgaaaattttgaaaaacgggccgcttttactatcgtttgctattactgccttaggatatggcggaacgtttgtagcttatacgtatttagcacctattcttgaaaaactaacaggatacgcaccaagcgcggttagtatcttactgctggtatacggtgtagcagtagccatcggaaatacaatcggaggaaaagctgcgaataaaaatccgttaaaagcattattttggatgtttctaattcaagcagttatcttagttattttatcgtttactgcatcgtttaaagtagcgggaacgattacgatttttgccatgggcttattggcatttatgaacgtacctggacttcaagtgctggtcgtgaacttagctgaaaagtatgttccttcagcagtgaacgtagcctctgcgcttaatattgctgcatttaacgttggaattgctattggttcttttgtaggcggcctgattgttgattcgattggtcttgttcatactccttggattggaggagtgatggttttaggagcggtcttattaacagcatggagccgctcaatagaagcaaaagcaaaataaaacaagagatcatcgcaaaaggcgatgatctcttagctataaaaggagaggaagcaaatgactacatttcaacatcataaggcgtatcgtcgtatgtacaaggagaatgagttaacgttaggtttgcatatgccgcttgaaaattatcaatatgccacgcctacgatggagaaacaagtggagctcacgcagcttgcagaacaatatggatttacaagcttatggttccgcgatgtccttcttcaagatccatcatttggcgatccagccacgggtcaaatttatgatatgcttatttatttgacgtatctggccagtcaaacaagagagattgctcttagtacatctgctattgtgctgcctttgcgccatccgcttcgcgtagccaaagaaatggcaaccattgatcagctttttcctgagcgtttgattatgggcgtatcttctggagaccgtcaagcagattttcgagggttaggtattcctcatgaagaaagaggaaagcgattttcagaggcttttcattatttagaagaagcgttaaataaagaatttccatctatcgagtctgctttgggatccattcagggagcaaatgtcgttcctaagccaacgaaacgtattccaacgatgattacgggatacagtcagcaaaatatggagtggtttgcacagtatggggacggctggatgtattatcctcgtcatccccattttcaagcagaagctattacccaatggaggaaactggttgatatctatcatccaggcgtttttaaaccttttacacaacctatgcatctagatttggcagaagatccacatgaaatgccaacgccaattcgtttaggatttcgagcaggtcgtaatacattaattgaacttctttctatttataaagaaataggagttaatcatctcttttttgctctttttgatagcaagcgtccggctgaagaagttatacatgagcttggcgaagaagtgcttccgcattttccggctcatctgtagctaaaagtactttagttgaagatccgaacggattagattcttaatggagaatctaacccgttcggatttttccattgatttcgttatgtctcaatctctttttatatagatttcaagttataggatatataagaaatatgtattagagttattgatcctatgttctttataataaaattatccattatctccttggatgatataaagtcgaaaggagaaacacgatgagtgttgcatttctatttccaggccaaggcgcacaatatgctggtatgcttcatgatataaaaaataaatggggattagcgactacgtttgaagaagcaagtgaggttttaaatcaagacgtattatctttagattcgtcagaaaaattaaaatataataaaaatgttcaaatatgtctttttattgcaggagtggctgcggctaggtcgtttaaaaacaaaggatactcgccagacgtggtaggagggcattctataggggcgtttggagcagcagttgcatctgaagtgttatcttttaaagaagctcttcttcttgtgaaaaaaagagggaaactgatggaaaatgcttatcctgatggttatggtatgggggttgtgatgggactgcgtgaacatcagcttctttctattgtaaatgaactatcaactgatgcagctcctgtgtacgtagcgaatctaaattctcctgatcaaataacgatttctggcaccttaaaagcaattgagaaagttcttgaaaaagcatctaaaaaaggggctagaaaaactaaaatgcttcatgtaacggtgccttctcactgtcctcttatggaaggagtttcgagtgaattacgaaaaaccataacggaggtgcaaggaaaggacccgtccgttccttttataggtaattgtaaagctcggaaattatggaaagctgctgatattaaggaagatttggcagcgagtgttgccctgcccgtccgttggcatgatacgacggaagttatgtatgaaatgggcacaagattatatattgaaatggctccaggaagagtgctaacggatttggctgctaagagcttccctgaagcaagggctatttcggcagccgaatctacgatgaaaactttgctgattttaatggaaaaagaaaaaatgtaagcgtattaatttagaagtatcagaaaggagctagaacatgagtggcataaaaaaaacttcaaaatcatggacaactcgccgagatcaaaaagcagcgcgccttgcgaaaatagaccatcttcttaaaggaaagttactaggtaatgaacacattattgaagcgttagaattgcttatatcacccggagataaagtagtgcttgaaggagacaatcaaaagcaagcatcttttttatcaaaggcgctgaatgaagtaagcgctgataaaatacacggtcttcatatgattatgtctagtatttcacgtccggaacatctcgacatatttgaaaaaggaattgctgaaaaaattgatttttcgtacgccggtgctcaaagccttcgcgtgtctcaaatgattgaagatgagacgttgaaaattggagaaattcatacatatctagagctttacggacgccttttcattgatttaattccgaacattgccttagtggctgctgacaaagcggatgtacaaggtaatttatatacaggagcaaatacggaagaaacaccaaccattatcgaagcaaccgcgtttaaggatggaattgttattgtgcaggtaaatgaacttgttgaagaacttccgcgagttgatattccatcttcttgggttgattgtatcgtcgtggcggatcagccttatcaattggaagctttatttacgcgagatcctcgtcatattacagaactccaaattttaatggctatgatgacaattcgaggtatctatgagcgccacagcgtacaatcattaaatcatggcattggctttaataccgctgcaattgagcttttgctgcctacctatggagaaaagttaggactgaaaggtaaaatatgcaagcactgggctctaaatcctcaccccacgttaattccggctattgaaagcggatggattgagagcgtgcactgctttggcggagaagtaggaatggaacaatacacagcagcgcgtcctgatgtgttttttacaggacgcgacggcagcctgcgctcaaaccgtgcgatgtgtcaagtggctggtcaatatgcggtagatgcttttgtaggatcaactttgcaaatagatggagaaggaaattcttctaccgtcacatctggacgtttgtcagggtttggcggagctcctaatatggggcatgaccctagaggccgccgacattctacgcctgcttggttggatatgataaacgagcagcacgaactagcgagaggcagaaaattagttgttcaaatggttgaaacctttcaatcaggaaatgagcctgtttttgtggagtctttggatgcgataaaggtagcgaaacaagcaggcgtagctactgctcctgtcatgatttacggggatgatgtgacgcatgttgtgacggaagaaggaattgcttatttatataaagcacaaagcttggacgaaagaaaagcagcgcttgaagcagtagcaggggtaacacctataggccttcgatataaccaaaataaagtggaaaagatgcgcagagatggcctagtggcttttcctgaagatttacagattcgccgtacagaagcaaaacgttcattattggcagcaagaagtgtcgaagatttagtagaatggtcggatggcttgtataatccgcctgctaaatttaggagctggtaagaaatatgcgtattcaaagtattcaagaagagccaagaccagctgtgttttactcatgtctaatagctaaagtggcagttaccgctctggttgatgaagcggtgcttacacctaagcctgggcttgtagatgcagcaacaactggatctcatcaagatatgaatattgagacgctgttaacttctgcttatgctttacaaccgacctttttacagattgcattatacagtcaaggaaagcagccaagtcagatgctaagggaagaaattgctcgaattggacgcgagggcgaacaaattatgtacggggctacggatggtgttaatacacacaaaggagccatttgggcattaggcctacttgcgtctgcaacagcggtttgcggcattcaagcatcacctgcatccatcacagaagctgcggggaaaattgctcgttatgcagatcgtttttgtcctctgcattcatctaatggactttgggtgaaaaaacagtatggcgcaaaaggagcggctggagaggcgaagcaaggatttcctcacgtaattcatataggcttgcctgctttacataaagctcgtaagctaggcatacatgaaacatcagccaggattgatactttagtaacactaatcgccaaccttgatgatacgtgtattttgcatcgtgctggtccggttgtgttaaaggaggttaaaatggcggcatccaatgtgttagaagctggaggggtatctacatcaatgggaaaacagcggctaaaagcgttagatcatatacttttatcatctaacgcttctccaggcggaagcgcagatttgctggctgctgtattatttttagatcgaatatctctttttaaagaatcgtaaacgtctgcagggaggagtggctaatggaaacgttagtgtttaaatacaaagccgatggaaagttaactcagcgcgcacatgtaggcgttgttggttcaggggatttagaaattttaatggttccttctgatgaagaacatgctcacgtatcagtacgaacaggaagtgaaggatttagtgaaacctggaaagccgtattagaccggttctttagtgttcataccattcaagcgaaaattgtaattaatgattttggtgctacgcctggtgtagtcgccttgcgtcttgcacaagctttggaggtgagtgaaaatgggagtgaataatcaaagctttattgagttaaatggaagagaacgagcgcaggccatcttagatcaaggaacattctgtgagctgcttggcccttttgacggaatcgaatcgcctcatttacctaagcaaaatattgttcctcaaagcgatgatggtgtcattatagcaggtgggatgatagcaggagagccagccgttgtcatttcagtagaaggagggtttcaagggggaggcattggtgaagtatcgggagctaaaattgcaggagctttagaactagcccttaataatcacaaaaaaggtgttcctgttagacctgtttttctattcgatacaggaggggtaaggctccaagaagcgaattatggacttttgtcgatatctgaaattggctcaactgtggttgctttgcgtgagcatacacctgttgttggagttatttcaggaaatgtaggctgctttggaggaatgtccatcactgcttcactctttagttatctcattatgacaaaagaagcaaggtttggacttaacggcccggaagtgatcgaacaagaagcaggggttgaagagtttgatgcaagagaccgaagcttaatctggaaaacgattggcggtatgcaacgctatgaaaccgggtttgcagataccttagcacaggatgatgtcactgctattcaacgagcggttcaagagacgtttcagaagaaaggaaaagtaactagtaaaacagaacaagtagatttttacagacatttgcttagtaaggttgatccttcagaaaaactggctcctgatcagtttcaagaattgtataacacaacaaaaaatgaacctatcccttcaacagtctcttactcgctgaatgaagttcgaggtaacatgcccaacagccgcggtcgcgtgtggatcaacgccttaataaatgatgaagaagcagattttgaaattccttccgttctttataaagacgcattgctaggaagagaaaaggtccgatatatatcggttgtacctaatccttataatcgtttcttacgtgcacggaaaggggaaataggactagatgaaggatgggcaattgccaagcacgttcgtgaaataataaaagaagatcgaaatcaatctcctcggcctataatcgccattgtggacgtaccgagtcaagcgtatggctatcatgaagaacttctaggtattcactatgcttgcggtgctgcggctgatgcttatgcagcagcgcgcttagcaggtcatccggttattacgttaattgtcggaaaagcaatttcaggagcatttctagctcatgggtaccaatcaaatcgaattgtggctttaaaagacgaaggagtgaatgttcacgccatgtccaaacggtcggcagcgcgcattactaaaagaagtataaaagaacttgaagaagtttcaaagaaagtcccgtccatggcttatgatattgaatcatttgcctcacttggcgctttatatgagctggttagcggtattcaagcagagcagcccacagagcgcgacgttcaaacgattcaagatattttgactggagcagtagaagatgtacgccgtgaaggtgtgtacgatttaagcaaccggctatacagtgagcaagcaaggaaggaagggcgaaaagcttctttattagtaagagatgagttggaaaaacaatggaatatatagctcatgatttgcttcagttaaaagaggaagcaaagcttatcagttatacacctatccctgattgggtggagcattctttagggaaggctccgtttgtcgttgtaaggcgggctgttcaacgagatagcctgatacctgttggagtaagaggagaaagaaggaatcagcgttttggagcatttgtatctgagcaggctgttaaacaaagaattaggccggaagatctcgtttctatttttcaaaacggccactttagaaacatgccagccacaggtgctttaaaagaagttgctattattttaaaagattttgcgtggggaccaaccggcagtgtggggttcgaatttgcaagtggtgccgaagttgttacaacaactagtgatttggatatacttattcgcctttcttcttatttgtcggtggaacaagcgcaactgatagttaatcagttaaaagagtgtccagtttctgtagatgtacaggtagaaacagaaaaaggagcattttctctggtggaatatgcaaggggagaaaagacgctgcttctgcgtactgtatatggaccttccttagtaaaactgaatcaattagtataaaagacggaagaggcatttgcaccttttccgtcttttctgtcaataccagcttttttccttgcttaacaagcgctttgcttcaaaaaagaatatttgaataaattttttggtgttaatgcgaatcggcaaaattttagaatctccctgtaattctttcatttttttacgaacagctgtaaagtcaaaaaacttagaagcataattttcaaatttcggatttgaaaagtctgttaatccgatagaagcaaagtgatttagtgagtgagtaactgctcgtcttattcgctgttcacaagctttggtttcgcgattaatttcaatggaagacgcgtgagctcctaattttttctcagccacattcacaaaaatattttttagagaagggaaatgtttttccacactttctctttggtcataagtgtacagaaactgtaaaatatccagtaaatcttttgcaccattttctcctacaatacctaactcggctaataagaatttacctacatcgtatagatgggcttgtttcgttaccggctggcttgaaggggtggcgtgatgagctgtcgctaaactattcaaggaggtttgaatatcatcgattgatttctcaagggagattcgttccgttacttttcgaataaccgttaaaatttcaattcggttaattggttttgtaatatagtattcaattcctaatgagtaggcttctcctatcaattctttggattccacctgtgaaatcataatcatttttcctttaaatgaatcttttaaatgacggatcgtttcgatcccgtcccgccctggcataagtaaatcgataaataaaatatcaatttgttttaaatttaacgtagaggcatctaaaaagcttccgtcgacgacttcttctacaacttctcctaaatcctcatcttcaatcagctgactgagcgttgaacgaatagctgaatcgtcatctgtaatacaaaatcgcataaactcatcctttctgaattagattacgaagggggatttgaatgataaacgtcattccgctgtcttcttgtgtagctttaatcgtaccttcaagttcttgaacaatatcttttacataagaaagaccaatgccagtagaggggtttccaaattgatcgtattttgaggtgaaaccaggttcaaagatagctttttcgtactttaaaggtactccaggaccgttgtcttgtacatgaaattctacatgttcagcttgtctatgtaccgataaaacaatccttccttcatctttgatcgcttccactgcgttggctaccaagttattaatgatcgataaaatggtgtaaacgtggtagctgaaatgttccccgtttacagaagaaaaaaaggtaatttgtttgtgaagagaatcggcatattttttgttgatgcgtacgatcagctcgattaattcctctgctttcatataattttggaaactttcatttgaaattgttttagataagcccgcaaaaatacgctggttgtctttttttacttcgtgaatatctcccgcaatccgaagcgcttttttactgagcgtttggtttagcacagaatgatctttttcctgctgatttaatacgcggtataaatcgtacgaagcttttgtaatcgcttctgtattatgaagggtcttttttaaatgaacggtttcttcataaaggcttgtaatgagcattagcatgtgctcattttgtttgcgaatttgacgttctcgtgactgtgattcataaatcgtcatcatattaaaaaagctaagtacaatgaagctgtgagcaaaagcaataacggccatgtcagataatgaatcgacatggattgttgtgtgcaaaactatatactgcgcagttagttccactacatcagcagcaatttcaatgatgagtccaatcactccaattacaatagcactataattcatgcggcttactttaaaaacaaaaaataaaagtgcatacgtaaagtagaagaaaaacgtagggtaatgcgtatgtgcagaagccgcaaattgaaaatgatcgagcatgacataatcgagcatgatgcgaaagagaacgacacttaaagcggttaacaagcccccggctaaaacggtttttcgttttaaaagcaataggaaaaagaaaaatgtaggagctccaaatgtaattcgaaatgtttcatttaacggataaaattttaactctcccgccagcgggacagtaatgagcatgagcaataaaatgtacggatcttttcgaatgaaagatttaaaattcagataatttcacctcctgaagtgattcgtgaattagtatacattgtgacagcgtccagcacaatggagaagagtgccaaagataaaaatataattacaaaaagttttgtaggtttttgtatgctctcgtaggttgcattgtacattaaaaatgaaaatgaaatcccgctttatgaaagcgctttaaaataaaaagttaattaagtgatgaggtgattttaatgaaaagagaaattgaacaggaaatgtcttacttacacgtcactgcaaaagagcagttacatgagtgggtagagcaaataaaagaattttcttcagaaggaaaaacggctgattacattccagctctgaaagatatggactcgtctcaattaggtatttgtttgattggtgctgacggaactgttatccagtctggagattatgaatcggtatttactcttcaaagtatttctaaagtcattagctttatagcagcttgcttatgctgcggcattccttatgtgctagagagagtggatgtagagccaactggagatgcatttaattctattataagactggaaatgcataaaccaggaaagccgttcaatcctatgattaacgccggtgctttaacggtttcatctcttttatctggggagacggcaaaagaaaaattaagctatttgtttgatgtgataacaatgcttacggggaaaacaccacttattaatgaaacggtctttgaatcagaatggcaaacgtctcatcgaaatcgtgcgcttgcctactatttaaaagaaacgaattacttacaaggagaagtagaggaggttctagaggtttacttaaagcagtgctcaattgaagtaacgactgaagatattgcactgattggattaattctgtcattagacggatatcatccagtatttcacaaacaagtaattccaaaagaagtagctaaattaacaaaagcgctcatgcttacatgcggtatgtataatgcttcaggaaagtttgcggcatttgttggtatgccagctaaaagcggtgtatcgggaggaatcatgtcattggtgccacctaatacgaaaaagcagtctccatttccagacggatgcggtatcggaatatacagtccagctattgatgagtacgggaatagcgtaaaaggcgttacgctactaaaaaaaatcgcaaaagaatgggatttgagtattttttagtctatttacgtactcttcattcgcttcaataatataaacaccaagagaaaaaactttcatgttgtgcatttgttctaccaaattttttaatgaggtgataggcatgcaacaagcagtcgaaagtgtgattagcgtcatcaatgattttttttggtcgaatttattaattattttacttgtatcaattggtatttattttacgattcgctctcgttttttgcagtttcgcatgttgaaagaaatggtacttgttttgaaagaaggacgagcggctaaaggtggaggagtctctccgtttcaagctttttgcataagcatggcagctcgagtaggaacgggaaatattacagggatagcgattgctattgcacttggtggcccgggtgctgtattttggatgtggattattgccattatcggttcagtatcaagttttgtagaaagtacactcgctcaaatttataaagtaaaaggatcaaacgggtttcgaggaggacccgcttattatatggaaaaagggttaaataaaaggtggatgggcgggctatttgctgtactcattacactatcatttggcctggtgtttaacgctgtgcagtctaatacgattacgctagcatttgagaactcttttggaacgagccgattgttggttgggattattatgacagttatatttgcggtaattatttttggcggaatcaaacgcatcgccaagatatcggaatacatcgtggtcgtattagccgttttatacattggaatggctctgttcattatctttaaaaatattgatcaaatgccggcggttctatcgctaattgtgaaaaatgcatttggatttgaacaggcgcttggggggtcaattggtgcaacgttaatcaacggagtaaagcgcggactgttttccaatgaagcaggaatgggaagtgctcccaacgccgcggcaactgcagtgacgagtcatccagttaaacaaggtcttatccaagcatttggtgtcttgacggatacactcgtgatttgtacaagcacagcatttatcgttctcttatcccccgcctataagcagggactaagcggcattgaactaacgcaagcttctcttagtacccatattggctcttgggcatcagggtttttagctatcatggtatttctatttgcttttagtacgttaattggcaattattattatggagaaacgaatattgagtttttaaattcaaataagttgtggctttggtcttatcgtgtaggtgttttagcgatggttatttttggatcgatcgctcagcttcagcttgtatggaatttggcagacttatttatggggatgatggtagtcgtgaacttgattgctatttttctattatcgaaagtggcattttccgccttgcatgactatactcagcaaaaaaaggaaggaaaaaatccagtcttttatagagatgcgttagaaaacaatcaaaatatcgaatgttgggaaagagaatctacttcactcccttctgaaaaagagaatattatctaaaaaaagttcagccaattggctgaacttttttatgcgtttttctttaattcagtttgcggagtgcttttagaaaacaatgtttctttcacgccgttatttgctgcttttgttttggccgaaaagattggatttaaaataacaactacgagtaagttagataataatccccagaacccttcataaagaccaaatgaatttcctgtggcatgtacggtaaacgttacaatcagccctactactaatccagcaatcgtactttctttcgattgatttctccagaacaggctgataacgatagccgggaagatttgtaccataccggatacccccagtaactgtagggaaacaagtgcttgagggaataataaaccgaataaaagtgccagtccaataacaacgaaaaccatagaacgagtaaccattgttaatgttttaccctgtacatttggattaattaaatctctgaatatattatttgcaaataagttagacgctccgatagccatgatagaacatggaattaatgaagcaagagcaatcgttgcataagctaacccttggccaatgccgccatatgaatattgaattaaggttaataatgctaatctaggatccgtcgtatcttgaggtaatacttgataagcaataaatcctaagaagatgactagaattaaaacaatattgtaaagcggtaagaaaatagcatttttacgaagcgaatctgcacttttagcagtgaaaacacctgtagcagcgtgggcccacatgaataaagctaaagcagatacgagtgatgctgtaataaaccatggaatgcctttaggtccttgtgttgggatcgttaatagctgaggtgcatcctttgcaacattgtcgatcatgttgccccagcttccaaaatgcataattggcagagaaacaaccataaataacataatcgcccatactaaaatatctttaataattgccgtatatgtgggacctttaattccgctgaaaaaggtataaagagccacaagaaagaatgaaagaataacgactgcttttacgttaatgtagccagttcctgcaacgcgaagagtatcttgaataccgctaagctgaagatcaatatatggaatgagcatcaatacacctactatagcaattaaagaggagagaaatttactgctaaaacgttctctggcataatcagcaagcgtagtaagtttgtgctttttagcaacagtccaaagctttggaagaaaaaagtatgaaattaaaaaggctaaaacagagtaaggaatagcaaaaaatgcgatgcttcccccctgataagctgtacttgtaagacctaggaatgtataagcagtatataaatctgctcctactaaaagccagacgagcaggcttccaaaacgtcttccccctacagcccactcttcaactgagcttctagatgatttgtcacgtcccgctataaagccaattgcgataacgacaagaacaattgctgatgtgattaaaagtgcggttaaatttccttgcattattcaatgtccccccaagatttttgtaaacgataaatgataaatgtacacacaggcgttaagaagacccataaaaataaccataaatgcaaaagaggtaatccaaaaataattggatgaatgttatttacaaaaggtaaaaaagcgaattgagcaataaatggaatgatgaataaaataaaaattatgaattttctattcaattttactcctcctactaaaaatttatctaacaatgttcactatgatagcaagtctgacatggtaaagcaataagttttttgaaaatttcgttataatctatgaaaatttttttagaaaaacaaaaaagagcttgtgatgagagtatatttgaaataattatgaaagaaaaaaaggggaataatctaagcgaagttgctcttgaagtaaaaagagaacggaaaagaagaaatttagttttgaccgggaagttttttttatttcgccgagataaagtatattgctattgcatcataagaaaagaatttgtatgttcaaatagagattcatggaaagaataaaacagagcaaataaaaaaactagacaataagtgcttgtctagttccaccactctgtcaatggtcctttgtcgccataaacaggatctgttgtaggaataggtacttgtgcaatttcatcaaatacgtgagggcgatcagtttgttttcctgttcgtaaattgtaatccatgccctctggataagctccaaccactttaaaatcagcagttgactgcagacgcatatgccctgttcctgcaggaagtacgagcacatcaccagcatgcaccacgatattttcccccatatgtccacctagttttaaacgtgcagatccgctaattacacctagtgcttcatgggaattgctgtggtaatggtgaaaatcatgtataccgcctacccagctgtttttccagttgtgagaattgaaaatgctctccactttctctttcttactaataaatacgtgttcatacaacaaaactggaagacgagggtgatttggaatggttccgtcgtcatcaaaataaagaacttttacatttgcataattcataagcatccctctaacaatcttttttcgtaattttccctgttttgtgcttgcataaacagagaagtttgctcgaagtacttcatttgttgcgaagtgcatgatatgtaggttttaacgttttcctaaaaggagtctcccacttcaagcgtagctaagtggtgggcagttcactttagtatcttttcttcatattgtatataagtaaagagtctagtgcaagaattctatggatatatagctgttaattcttattatgtaaatgaatattatatattagtataattttcagaagataatctgctcgtggagtaaaagaatcaaacaacaagaaaagttagggttttagttatttttataattaaaaagagatttttagaaggttaattcggaattttacgaataattcattatttttagaaaagtaatgtaaacattttgtatattgagtaatagtaatgaatgttatatactgataaaaaatatattcctatatgtgactggcgcaacatggatgaccatgggggagcatatagcgtataagccgcgcgcctgggcaaacacttgagaaaattccgcaagtgttttttttattttcctagggaagaggagtagatttggatgagcaatatgcaaaggaagatgggaacatttgctttaaccatgacaggcataggttcgattatcggttcagggtggctgtttggagcatggaaagcagctcaaattgcgggacccgcggctattttttcatgggttattggaatggtggttattttgaccattgccctatcatatgctgaactgggcgcgatgtttccacaagcaggagggatggttaaatatcctcagtattcacacggatcatttattggttttttggctgcttgggctaactggatttcaatcgcttcaacgataacagtggaggctattgcatctgtgcaatatatgagtacttggccgtggaagtgggctcgctggactcacgaattggtagacaatggaattttaacatccaaggggttggcagttgcgtctttgttattattcgtttacttttttgtgaactattggacggtaaatctctttgctaaagcaaactcatttattacgattgttaaattaattattcctggtttaacggcaggggctttattttttgctggttttcatagtggaaacttttcaagtgagcatggggttgccccttatgggtgggccagtgttttaacggcagtggcaacatcaggtattgtgtttgcatttaatgggtttcaaagtcctgtaaatatggcaggagaagcaaaatcacctaataaatcgattccgatagctgtaattggttcaatttttattgcaggaattgtatacattatattgcaaattgtctttatcggagcagtaagtccgtcatcaattgctgatggatggaatcatttgaattttaattctccttttgctgatttagcgattgcgcttggaattaactggctaacaattgtgttatacgcagacgcatttgtttctccttccggcacaggtgctacatatacggcaactacttctagaatgttatacgggatgcagcaaaatggatacttgccaaagatatttggtactcttcatccactttacaatgtcccgcgcccagctatgtggctaaatttagcagcttgcttcttgtttctctttttatttagaggatggggtgtcttagcagaagtgatctcagtagcgacgcttatctcttatattatgggtcctgtagcgcttataacattaagaaaaacggcttcacacttttaccgtccattttatttaaaaggggcatcagttattgcgccatgcggcttcgtttttgcttccttgacgctttactgggcaaggtggccacttacaggtgaagtgatctttattatggcaattggcctgcctgtttatttttattaccaagcgaaaaataaatgggtgggctttaaaaaagaatttttaaccggggcttggatgcttatctatttagcgtgcatgatttttatttcctacataggaagcgaaaaattcggaggcaaaaatattttgcctttcggatgggatatgctagtgattgcttgcgtatcattagctttttattactggggaattaaaagtggcaaatctaaccgatatatgaaagaagctgaacaaatcaatcaagaaaattttaaatctaaataaaaaaacacgagcccgtgctcgtgtttttttatttagaggagtggagaatttagacttagtttttatcaaaatattgtaaaaaatatagattttaaggtttaagtatttatacagagggaacctttatttgggataaagttctaaaaaaacaaaataaaggggattaggcagctgtgaaaaaaatgaatgttttggctttagcttttgtacttacgctagtattagcggcttgcaacaattctaaggaaacgggaggatccacgtcggctaaaaataaggcgattgaagcatccattgacagcgcttcttacattttagtagatagtgatgaaggagctacaagtgaagaaaaagggctgttgaaagttgatttaaaagtgaaaaatgtctccaaaaacagtatatctttatcggattacgacggtgtgtatttatacgaaggagatgaacagctgtctccaaaaacgggagtgaacagtcgtgagcttggactagaaagcagtgcatctgacaagattggcgctggaaaacaaaaaaaattaacgtttgtctttgaagtcaaaaaagataaaaagtacaaaattgggcttcagccaaaatcatctgattatgatgaagaaattgacgaagtgacattaacactggatacgaaaaaatacgcgaaaagctataataaactgcaagatccagaaaaagctctgcaagcttatacagaagtcctttacttaaacaaagaaaacgtagactatgataaatatgtaacagcagacaaaacagctgtcatagaagaacagaaaaaagcgtttaatgaggaattaaaaggtgcgttttctaacagtttaaccgacaaagcaaaaaaagatttttttaacatgtataaagatgttttaaaagaaaaagcaagcgtgaaaacaaatgtgattgcgaatgcaaataataaagccgtagtagaagtggagtacactactcttaatttatcagacttatattcatacgtatcgcagcttaagcgagcatatacagatgaaacgaaagattacgatacagaacactctgaagagtttgcggcttctaaattcaaagatattgtaaatgaattagaaacgaaagaaggaaggcgtcccctacgaatttttatggtgaaagaagatgggaaatggactgtaaagtcaagtgacctatacagtgattcgttaggtaaaacgtttggatcaagctatattcggtagacaaaaaagagaagaatttttcttctcttttttgttttctgtaaataaatcaacgagtttttgtaaagctaaatttatcaaaatatgctagtataggttcattcattcttttattcttattatgataggcatcaatggaggttcttactaatgaaagcaaattattgtaaagatacaaaggccgttcgaacgagccgcatttttcctaatgatattaataatcacaatacgttatttggcggaaagttaatgagtgatattgatatgattgcgtccatttcagcttatcgtcacagtcgtacagagtgtgtaacagcttcagcagactctattcattttctgcaccctattacgcctcaggattctgtatgtttggagtcatacgtatcatggacaggtcgctcatccatggaagtgtttgtgaaagtgattaaagaaaatttaaaaaccggggagcgtcaaattgcagccacatcatttttaacttttgtggcaatggatgatgatggaaagccccgtgcagtaccggagcttattccagaaacagaagaagaaaaatacctgtttcaaacgggggcagatcgcgctgccacgcgtaaacaagtgcgtaaaaaaagcaatgaactagcctcggtattggatttaggacaaccttggtagcataaaagagaggccgagacaaaagtattttagctcaaatgaaaaacgaaccagtgatcaacatgtttgattagtggttcgttttttttgttatggtgaacgtaggtttcatctgtttcgttccttctagcagttgattggagggcaagaggaagactaagggggaaaagggaaagagacgaggaggctcatcggcggccagcggaaagcaaagtcttgcacagtaatcaactgcggtgtcacaagcggttcagcttatgtatcccatttgttcgcctttagattggattcatttagttatgtcttaacctttcttttatatttgatgaatctcctctcctgaacgagaggaggaaataaaattatatgaaatttattttcgttcatggtaatatgaatttaatataattttctaaaaagtttaaaaagtacaatatttatgaagaaaggtgtcgtgtctaatggtaacagtagaagcagcagaaagacaaaacagcagcactgccctgcgccgtgatgttaagtttctcggtcaattgttagggaaagttctggttcaccaaggtggagaagaactgctcagcaaagtagaaaaaatacgcgaagtagcaaaatcacttagagaaaacaaagatgaagttatctataaagaaataaaaaatgaaatcgttactcttgaacagccgatgcgcgagcaggttattcgggcgtttgcagtttattttcatttagttaatattgcagagcaaaatcatcgaattcgtcgcagacgcgaatatcagcagcaagaagattctattatgcagccgggctcattggaaagtgccgttgtttcgcttaaaaataatggcgtggcgccagacgtaattgctaacttgcttcaaactctatccctagagctcatcatcactgctcatccaacagaagccactagacgaagtgtccttgatattcataaacgaatggctgagcttctaaaaaacttggataatccaacgttaacaaaacgtgaacgtacggaaattgaagaaagactgtttagcgaagtattgattttatggcaaacaaatgaactgcgagatcgcaagccgacggtaatggatgaagtatccaatggattatattattttgatgaaacgttatttgaagtgcttcctcaacttcatcaggagttggaaaattcattgcaggagaattaccccgaagaaaattggaaggtgcctaatattcttcgatttggttcatggattggcggagaccgagatggaaatccaaacgtaactcctaaagtaacgtggcaaacgcttgtcaaacaaaggaagttagctattcgtaaatataaagagtcacttactcaattgagacaaaggttaagtcagtctacaaaaagagtcgcagtttcagataatcttcttgattctattaatcaagaaatatcgctgctgcctgagaaaaagcgatggagaatcaaacacgaagtatatcgctgcaagcttacgattatgcttcataaattaaatttagttggagaatcggaagcaggttatcaaaggtcggaagaacttctacatgatttatttctaatcaaagatagcctgcaaaagcaccagcctcaggattatcagttaaaaagcttatgtaaattaattcgccaagttgagctgtttggttttcatttagcaacgcttgatatccgtaatcacagcggggaacatgaagcggcaatcaaagaaattttccatgctgtttctttagctgaagattattcagcgttaacggaagagaaaaaagtcgagctgctagggaaagttcttcaagacccaagacctgtgatatcgtttgtagagaattactctaaagaaacgcagcaagtaattgaagtatttaacatgatacatcgagcacataaagaatttggagaaagatctattgaagtctacttaatcagtatgacgcagtctgcaagtgacttgttagaagtcatggtactcgccaaagaagcgggtatttaccgccttcatgcagatggccgcattgaaagtaagttaaatatagctccgctgcttgaaacgattgatgatctcacagcgggtcctaaaatcatggaacagctatttcaattagatttttatcgtgagcacttaaggaaacagcaggatttgcaggaaattatgcttggctactcagatggaagcaaagatggaggaacgcttactgctaattggaagctctacaaagcgcagcaggaaattcatgatatggcgaagaagtatcaagttcgtctgaagtttttccatggtcgaggcggctcactaggtcgaggcggtggtccgttaaaccgaagcattttatctcagcctgttgagacgctaggagacggtgtgaaaattacagagcaaggagaagttctttcttctagatacgctttatatgacattgcttaccgaagccttgaacaagcggtctcagctcttcttacagcggcagcaaatgtttctcaagaagctgaacaatgtgatattcgtacacatgaatgggaagaaacaatggacgagatttcaactgcttctttacgtaagtatcaagagcttgttttcaaagatccagactttttaacgtattttaaacaagctacacctcttcctgagctgggggctttaaatattgggtcacgtccaatgagtcgaaaaggaagtgatcgctttgaagacttgcgagccattccgtgggtatttgcatggactcaaagcagacagctgcttccagcctggtacgctgcaggtacgggcttacagcatttagtagagaaatccggagatatacagcttcttcagcaaatgtataaagaatggccattcttccgctcgaccgtcgataatctgcaaatggccttaacaaaagcagatttaatggcagcaaaagaatacacggaaatggtacaagacccggctatttcagagcggttttttaccgccattaaaaaagaatataatctcacaaaagaaatgattcttcaaatcacaggtcaaaaagaattaatggatcatcttcctacgattaaagaatctattaaattacgaaatccgtatgtggaccctctaacattcttacaagttaaggtcatttccaagctgcgtgaagatgaggctggaacgttaaatgaagaacttttaaaagaagcgttattaacgattaacggcattgcagcagggttgcgtaacacaggctgatgatatcaaaagacacctcaagaaaataaaagaggtgtcttttgtttattcttctcacataaagaactgtctgtcagttccctctcttttaaagagaacttccgcctgcgaaataggcattgagaaaaatcaatgatagaatagagaaaggatggaaatattctacaaatgggtgcgagtgacgggataactagattgaatatggaggacgaggacaatggtaaaaaattcgcaaatcttcattgaagatgactccgagaattctatatttattggactggaattttgtgagtatacacaaaagatgaatcctacttgtttgtccaaacagcatataaatgtgtttattcatccagaagaactcaccgtggaatttaagaaaacaaaaagtgatagaactatcgacgattttcatctcatgcatatcgttccggttcattgctttaattatttattatgttcgatttcgcaaggtattgttacagatgttcagctgaaagcggttggtcatcagggagaaacgttgtttgaagaaagtcttacattgaagtttcatgaaaaagcgacggattatgaagaaaccctctcatttttcaagcatttaaatcaagaaatacaaaagcagacgaaaaaatatacagccagttatatgagctcataataaagcaagctgcggtttttaaaaccgcagcttttattcgtttaaccgaaaaaattatgttagagatgcttacaaatcaagagatttttcagtgggaaattgataaagtaaaactaagagaaatcagtggacagaaaagcttttagcggctggccgctctttattcaatatataagggttaggttttaaggttaaaaaatagcgatgaatacgtatggtcattgtagatgaagtgctaaggtcgctctatctgcaatcatgtagaatcttcgcgcgcttatagtctgttttacggaacgaaaaagctgcggaattagaagcactccttctatttctgcggttttttttataaacaagaaataaatttacttattgtacggaggcgatgcagatgattaaagatttagtattggctaaggaatggctgcctgcagcttattcacatgatttaacagatcagcccttgcaagtaacgattttagaagagcgagttgtactttttcgcacaactaatgctattaaagcatttaaggatttgtgcatccaccgcggtgcagcgttatctcttggaaaagtggtagatgattgcattgtatgcccttatcacggatggaaatacgatgatgccggggcttgtgtgaaaattcctcaacagccgccgggaagagctattccttcaaaagcaaaagcacaggtgtatgactgcgttgaaaagtacgggattatatgggtgaagatgaacagcgaggcaggtgatactcctcttcccctgtatgatgaacatcttaactccggattcaaaacggtttgcgccagccctcatactctgcaggcagcagctcctcgtgtcgtagaaaactttctagatgtaagccatttggcttttgttcacgaaggaagcctggggcactctgactacgccgaaattcctgattataaggtgcattggaaagataaccgatacgtttctgatgaaatcgctgtgtacgcagatgcagatggcacgggtaactttacgactatttattacacctttgaaattcttcgtcctaccgttgcaaggttgaaaaaagtgaaccacgaaacgggtgaaatcttttcaatgctgtttgcggttttacctgaagaggaaagaaagtccaccgtgtttgcgctggtttctagaaactattcgtttgatgcacctgatcaatatttccgcgattttcagcagcttattattgaacaagataccagtattgtggaaagtcaaaaaccagaagagctgccgcttgacttacaagcagagcttcatttgaatccggaccgactgagtattgcgtatagaagatggctcggcgatttaggagtaacctttggaagtgatataggatcaaggttaaaaaaagctgctcaataaaaaaagaagaaaggagtctcctttctttttttatgcatgctcacggataagctgctgataactattaaaaagggtaggatatgttaattggcttaaaatgacgcaggaaagcgtagcagacgctagaatagtaaaaacgataagcagctggaatttgacagcttgtatcggatctgcccctccaataatctggcctgtcatcatacccggaagctgaacgagtccaattgttttttgactttctacagtaggaatcatgctagctttgattgcggcatttaaaatactatgaatagcttgtttaggagtgccgccaagcgccagaatcaattgaatttcgtctcgtcttctatttacttcagcatctaaccgatttaaaaataaattggccaaaatcatcgaatttccaataatcataccgctgacgggaatgatatatcgcggagtagcagggataatatgtagtccgagcataacgcattgggtcaggatttctacaataaaaagagtgacaaatacacgaaagaaagctttaaatccctgcttttttttctttacaacattttgggaagcgaccgtcagcataacgaataaaatgagaataataaacgcagggtgattcgcgtcaaaaataaacgataaaacatatccgatcactaacagctgaacggctgctcgaatactggcaatgataatatctttttcgagtcctatacgaaaagattttgataaaaaaagagcaataaaaacaaaaacgattgtaaaaatcagtgaaagtgaactcatagaaaggctccttcaataaattgttttgtttcagcttttacaggagtatgaaaaaaggtctccgtcttcgctttttctacaatcactccgttcattaaaagccagacttcctctcctaaacgtttcgcttgatctaaattatgggtaacccaaataatcgttttattccgctctttatgtaaatgagaaataagctgctcaatttcatgagcagaagtggcatccaaagcggaagtgatttcgtctaaaagtaaaaggtcagatccgttcgacagcgtgcgggctaatgataatctttgtctttgaccaccggataaatctcttgcatcctgctctaacaagtcaggtgaaagacccgttaaggcacagagttcttcaggcataatatcctgcttgccatggagtttttgaacaagcatcatgttatctcgcactgttccatcaataacaggagctgattgaaaagcaatgcccactttttttcgtaaatcagaaatagtccatttgctaatgtcttttccatatacttcaatacttccttcatcaggtgcagaaagtaaattgcacatggaaagaagggtgctttttcccgatcctgatggtcctaccatcatgacgagcgagccttgcattactgtacccgatatgccttttaaaacactatgttctttatccttaaatgttttatgaacgtctgtaaatgtaatagcaggtattgaattgaacgtgttcatagtaactcctttttcattcgttttgtttattgtagcataagcgaaagtataaaaagttattggatgatataaaaaaagctgtgaaaaatcacagcttttaaacagttgtattcactttttggctggcttttaaggcataatctaaatcttcaagaaggtcgtcgattgcttctgttccaaccgataaacgaataagttctggcgtcacacccgaagctttttgttcgtctttagatagctgttgatgagtagtgcttgccgggtgaataatgagtgatttagagtcgccgatattggctaaatgagaaaataactgaaccgaatcaattaacttagccgcagcgttttttcctccccttacaccaaaggttaaaattgctccttgccctttaggcaagtatttttgtgccaaagaataggaagggtgggaaggaagccccgcataatttacccattgtactaattcatgctgctctaaaaattttgctacctttaatgcgttttcgctgtgacgctctaatcgcaggtggagtgtttctaccccttgaaggagtaaaaaggaattaaaaggtgataaagcagctccaatatctcgtaaaagctgaacgcgcgcttttgtaatataagcagcttcaccggcagcttctgtgtatacaaggccatggtaacttggatctggagttgttaagtctggaaatttcccgctcgcttcccaatcaaattctccactgtctacgataacacccccaattgctgttccatgtcctccaagaaacttagtagcagaatgaacgacaatatctgctccgaaatcgatgggacgaagaaggtaagggcttggaaccgtattatcaataataagaggaattccatgctcatgggcaatgtctgcaactgcctcgatgtctagcacatttccctgcgggtttccaacggattcagcataaattgcctttgttttggaagtgattgcatttctaaaattttctggattatcagcgtttacaaatttgacggtaatgcccagtttaggaagcgtagacgaaaagaggttatatgttcctccatataaactgcttgctgatacaatttcatctcctgtggaagcgatattcaaaatggaaaaggtagtagctgactgacccgaagctactcctagagcacctactccgccttctaactcagcaattcgctgttcaaaaacgtccgtagtagggtttacaattcgagtgtagatgtagccttgttcacttaaattaaataaagatgcagcatgctccgtatctttaaacccaaatgagcttgtttgataaataggtaccgcacgcgaaaaagtagccgggtcaagctgttggccagaatggatggcttgtgtttcaggacgaaatggtttcttagtagacattgaaactcctccttaaatataaaacttataaaaaacataggaataataaactttaatcataatatacgaattctattgaatgatgtcaaatgatagtttgaatatttagaaaatataaataagattaatactgtcattcagcattaagatatctctttaatttctaaaaataccataaaaaatataaaatgtaataaaaatgtaaattaatttgtataattatgttagaatattaggtgtttgagagtttcttagaaagagtcgattttgctagaaaactttaaaaaacagcaaaagacgggtcttaagagctaataacgaaacaatataaaaggagtttgattatgagcacagaagttaacgtatcttcggaagtccaagagaaaggaaagccctctatttttggttttattacgagtccagttgtacagtttgagaaaatgaaaagcagcccggtcatttggggacctcttttacttatcctcatcttaacagctgcaacaacgattctagccgtctatacccctcaggcaaaagaagcattacagcagcaaaaagaagctggcattgaagtgaattcaacatttagtatgatcggcggaacggttggaggagtgattgcaatagttgctacactggcattcacgagtttaattttgtttttaattgcaaagttagggactggaaaaacaacttaccgccaaatgtttagcttaaatttgtttgttacgttcatcacagcaatcggtcagctaattaatacgggagtagctgcactagcacatacttcagctaatgtgacttcgttaaatggaatggttgatgcgaaaggtgctatgggaggagtatttacttccattgaaatcttttctatctggggacttattctgacagcagtaggactacaaaaagtggcaaatgtatcaaaagctgcttctattattacagtgattattttattcatcttaggagccgctatttcaggagttggaggagctgcttcagaagcgcttaaaggagcaggattgtaaatgaaaaaaggaataattattacagctgtagcagttgttattgtggcggttattggaattaacgtatatcgtgcacaaagtgtaagtgggaaagcaatcaatgttcacgtagcaaatataaaggaaaaaaagttaagaaatacagttatggttcccggtacgttaaagcttgctgatgagcaatatgtctattttgatgctgaaaaaggcgaggttgaacgatttcacgtaacagaaggatctcgtgtccagcagggaacctctcttgtaacatacgaaagcgatacgcttgatttagagcaagaacaaaataagctagaaaaaaaatccagtcagctgcaaattgactcagtaagcaaacagctttctaatttaaataaaaaacaaaaagaattggaaaaagaaatgagtaagcaagaagcgagagatcaaatcgatacagaacgtacgcagctcaatctcgatttagaaacggctaaaattgatttagaacgaaacaaactagaagccaaatcaattgctaaaaaagaacgtaatttagacgtagcgagtgatattaatgggacggtgctagaagtagataaagaagcggttaataacacaagtgacgttcaaaaaccgcttatacatattggtaataccgatgaatacttagctactggtgtgctgtctgagtacgatgcattaaaaattaaaaccggtcaagctgtcaaaattacatcagatgtgctgcctgataaagaatgggcagggagcgttaaacaaattgactatctacctcagcagcaggcatcagcagaagcgggcaatgatggggctaatcaatatccagttgaagtaaaagtagatgaccaagatatcacgatgattaagccgggatttaagctgctgcttgaaattgaaacaagcagtaaaaaagcttcatcactgccgataaaagcagttgtaaatgaagacggagaaaaatatgtatatgtggtgaaagataaaaaggcggttcgtaaggaagtaaagattggagaaacaacaaataaatttagtgaaatcaaaagcggcgtatcttctaaagacaaagtcattacaaatcctacaaagaacttaactgacggtgcggaagtgactgttcaatgatcgagcttgtgaatattcataaaagttatcatcttggcaaagaggaagtgccaattttaaaagatattaatttgaagatttatgacggtgaatttgttgcgattatgggaccttctggctctggtaaatcaacgctaatgaacattatcggatgtttagaccgttcgtcttcagggtcctatttattaaatgaacaagaaatctccacttatagtgatgagcagcttgcaaaagtaagaaatattcatatcggttttgtttttcagcaatttcagctgttgccgcgtttaacagcggtagaaaacgtagagcttccaatggtatatgccggtgtaacgcgtaaggaaagacgagccagagcagaagctgcgcttgaaaaagtagggctgagtgagcggatgaaacatttaccgagcgagctatcaggagggcaaaagcagcgcgttgctattgctcgttctattgttaacaatccgacgcttattttagcagatgaaccaacaggagctctagatacaaaaacaagtgctgatattatggagcaattttctcagcttaatgcagatggcacaacggttgtagtcattacccatgaacctgaagtggcagaatacacatcgcgtacagttatcgttcgtgacggtaaagtgctaagtcatagcgataaggagaacgatagcttatgagtttgatagaaaatattcgcatggctctctcttcggttcttgctcataaaatgcgctctattttaacgatgcttggtattatcattggcgtagcggctgttattatcgttgtagccattggtcagggcggagaacagatgattaagtcggaaataacaggagcaagcaatacagttgatgtatactatcagcctcctgaagacgagatgcaagctgatgacctttcaatgacgggtgagcctatctttacagaggatgatattaaagctctttcgactattcccggagtgaagaatgtggtggcttctagttcaatgggaatggggataagatatagagacaaggaatctgatacgactgttaatgctattaacgaaggctatattgaagttaatcagctggaagtttcaaaaggaagaatgttagacagctctgactttttatcaggtaatcgagtaggtgttatcacaagcgatatgaaaaaagagctatttgataaaaaagaagcccttggacaagtagtatgggtgcaaggccagcctatcaaaattattggtgtcacaaaaaaggcaacgggctttttagcatttgaaataccaaccatttatattccgaataatacgtataaatcaagcttcggtaagctcgattacacaaaccttagtgttcaagcaaaaagctctgatcaactaaaaaaagtagggaatgacgcaacggatttgttaaataatttgcatgatgcggaagacgcttaccaagtgcagaacttagaagaaatagcagatagcattggaaatgtaacgcggattatgacaacgattattggatcgattgcaggcatttccctgcttgttggcgggattggcgttatgaacattatgctggtttctgtaacggaacgtacaagagaaattggtattcgtaaagcgttgggagcatctaaaagacaaattctaactcagtttttgattgaatccattaccctcacgttaattggtggtttgcttggaattggcctcggcgcgggcggggcagctcttgtttcattatttgctggctggccgtcattaatttcgtggcaagtagtacttggaggagtgttgttctccatgacgattggcattgtattcggcatgcttcctgcaaacaaagcggcgaagctagatccaatcgaagcattaagatatgaataaagacatgcgttcgcatgtctttattttaatttaacgagaaccaagagaatttctcgtttttcttatttattacttactagggttgatacgggctacgttaataatatcatgtattttctctaccaaatcgagcatgagaaatccgtttccttcagagctttttcgatatccaagaggaagggttcttcttacaagctgagcatagatttcggcttcgattaaagagcggccaaattccttctcacataagttaattaatagagctaaagctcctgccacgtggggagttgccattgaagttcctgaaagagtcgcgtacttattttccaagtaagtagagataatgttaactcccggtgcgactaggtccacttcttcatttgcattagtaaaaggggcaagatttaagctgctgtccactgctcctacttgaatgacttcgttgtaacttcctggatatgaatattcaagggtttcttcgcggtcgtcaccttcatttccagccgcaacaacaacagaaacatctttattcacagcattttgaacagcttcgtgcagttctggaacgtcttgtggtcccccgagtgacatggaaataactcgtgctcgctcattgttaggaccgcgccattcgacggcgtagttaatagcgtcaataatccattcgtaatttcccgatccttcaccggtaagtacttttaagcttagaatttttgctttgggtgccactcctactaccccttcattattgagcgcagcagcaatggtaccagacacgtgagtgccgtgcccattattatcttcaaatacagaagaatccccgtcataatccgaagtgaagtttcttcctccgataatacaatcttttaagtcaggatgatttgtgtcaacaccagtgtcgataactgcaattacaatgccttctccttgattgctttgttcccaaatagcaggcgcttgaattaagcttactcctttaggcgtttcgtttgttgagtcgataatcgactcaattgtataaggaattaatttgacttgtaacggttgttgagtcatagtcatcctccttaaaatgaatttcataaaaacggaagttgtttaattataaattcccaactattgctataaattaaacatttttcatgcgaatcctttctttttaaataaaaagactcacaaaagatgtgagaagaggaaaaaagaccctgaagacaagcccgatagagatttttaatgttatctgtgtattcacttttaatgtttatctcacactatagaagaaagaaactccaagaaaaatcacataggactggtaacttttgatataattacgaacggtatgacattctcaaaatacatgatatttataaatatacatcaatttgcaaattacgaaggggctgaggatagtgtcaactttaacgtctcaatcggtcattaaatgcggaaagtatgaactgaattatgcggaccgtacgcttattatgggaattttaaacgtaaacccggattcattttcagatggcggaaaatactacgatgtagataaagcggttgctcatgctgaggaaatggtgaggcaaggagcagacatcattgatatcggaggagaatcaactcgtcctggttatacaagaattagtgatgaagaagagattaaacggattgtgcccgttatttctgaagtggctaagcgcgtagaggtgccgatttctgtagatacatacaagtcggaagtggccaagcatgcgctagaagcaggagcacatattattaacgatatatggggcgcaaaggctgatcccaaaatggctcaagttgcagctgactataatgttcctattattttaatgcataatcgccatgagcccaattatacaaatctgattacagatatgataagtgatttggaagaaagcatatcaattgcaaaagctgcaggagttcgagatgatcaaattattttagatccaggcgttggctttggaaaaacggctgcgcataatgtagaagcgattcagcatctagatcagctgacaaagatgggctatcctgtgctgcttgctacttctcgtaaaggatttattggacaaatagtcaatgctcctcctacggaaagaatggaaggaactgcagctactgtatatgcagggattgcacaaggcgttcaaatggttcgggttcatgacgtattagaaatcaagcgctttgtaaagatggcagatgtactggtaggaaaacatacatttcagttttaataatcattaaaatgccatttctattaggtgaagattcccgagcagtgaagctcgggaattttttatgtatgtaaagtggcggaggaaaataatgcacgattggatggttgattttacataatttagctttatgatagaaagagaagatataacgctttcatattctgattaaatcgtgctgcttaaaatgaaataaataacatcttggtattcagtcttattcaatcaccgaaatatggaggagagaatgaatgaaactagcattgcttcttgtcattattatcggcgttgctgcccttgcaggtacgatcagtgctgcaaagaaagtagatgaagattacggaaaatctaaaaagaaaagtatagtgaatttatctattatttacggagtcgtattcataggatcaatcgtaggagtagcgtggtatattgcagtgagaccataaataaaacgaacacttccgtgttcgttttattttgattttaacgttaattctccgcttgaaacagctgcatcaataggatattttccatttccatgctttccttttaatacatcttctgttacggttgcattgcttaacttaaagtcattgtttatatcaccgctgcttacttttccattcactttaaaaccagcgcttttcggaagaaccagcacggcatctccagatcctacatctatagaaaccgcttcttctagctttttaaaatccatatagagatcaccagatccaatgcgcgcctgaagttttcctttatagtttgttcctttaatttccccagagcctacagcaaatttagctgtttggctttcaacattactcagctgtaaatctccagaattgacatccgtacgaagagaggtgctcctcaagtttgaaatacttgcatttccagaacctactttaatcgaaacatctttcagctgaagcgcttgctcaggctgtgtagcaacttgaaggtccccagaacctaccgtaagcgcaaggttgtggtgataatctctaggaatgcagattgtcacttttgtatttgaaaaaatagaaagccattgaaaaggacttttttgataagtgacgactagggtatctccattttgctttacatctacttttcctttaccttctacttttgttttaatatcttgacgatcttgcggcacgacagttgtactaatgctgggagagtcaatttgaatatgctgaatatcacttgataacgccgcttcagacctggacgtcttgaatgaacttaacgaccaagaggaaggtgcaaatgcagtagaaaagaggactgccgtaccacctatcactaaaataaaagccaatatttttttcacgttataacccgctttctacctaaattaaatttgttttcttctaccataaagtgtaaattgaaaagcgtttaatttcaacgaacagcaggattatttttttctacgtctcaagtcgtaaaaatgaaatctttttttgaggaattaaacgaaaagcgaagtagatatttaagcatactcattaaagaatcaatttttttgtttcaaaaataggaaaataattgggttgaaaggacgattaaattcactttttttgtgtaattttccgatgggtagttcaaaagaagtgataaataaatagaattttcataccaattttattattccgaaaaacttttaaagtgttgattattaaaaaaataaagggtagaatttgttcatatcaattgaatacagctaagattacgatcttgtatattatcagtaatatggtctgatagtctctacctagtaaccgtaaaaaactagactacaagaaagtttggatataagcagcaaaaagaagagcgtattctcatgagtacagtcttctttcaaagctcttacttttcatactttctgttattgtcagaatttatgaaaagtaagagctttttttgtttttcaaatacacacctgggagtggcttgcatgtactttttattaaatttattaggcgtttttgtcgtaatgggtgtcgtctttttatgttctcctaaaaagaaagagataaagtggcgtccaattgcttcactgttagtcgttgaagtcctcattacttggtttatgttaggaacttcaatcggaacatggattattaataagattgcttcgttctttacttggctaatttcctgtgctaacgatggaattgcttttgcgttcccatctgtaatgggaaatgaaacggttgactttttcttcagtgcattactgcctatcatctttgtcgtgacattttttgatattttatcttactttggtattttaacgtggattattgataaagtaggctgggtcatttcgaaagtttctcgtttgcctaaattagaaagctttttcgctattcaaatgatgtttttaggaaatacagaagcattagcggttattcgtaatcagctttctgtgttaaaagacaaccgtttgcttacgtttggaattatgagtatgagcagtattagcggatctattatcggtgcttatttaacgatggttcccgctacgtacgtgtttacagcaattccactgaactgtttaaacgcgcttattttagtgagcttattgaatccagttcatgttacaaaagaagaagatatgatttacgtaccgccaaagtcggagaaaaaagactttttctctaccatttcaaacagtatgttagtcggaatgaacatggttattgttattttagcgatggttattggatatgtagctcttacatctgcgcttaacggtattttaggcgttatcgtagacggcttgactgtacaaaagattttctcttatatctttagtccattcgcatttttactagggctaacgggacatgatgcaatgtacgtagctcagctgatgggtatcaagctagcaacaaatgaattcgtggcaatgatggatttgaagaaaaatctagatacacttccaccgcatacgattgcagttgctacaacattcttaacatcttttgctaacttcagtacggtaggtatgatttatgggacgtataattctacgttatcagaaggtaaatcaacgattattggaaaaaacgtatggaaactgcttgtgagcggtatcgctgtttcgttattaagtgctatgattgttggattgtttgtttggtaaaaagtgtgaaaaagctgtgctttcgtcttcgaaagcacagcttttttcttgttgcatcctctattcatttaaagaaaaacggttatgaatatcaacagtaaaagaaaatcacactattcaagaaaaattcattttacttttgcagaaaaacattttaaatctagtgagcattatgttaagattacaaaaggctgtttcatttaaattgagaacaccgcataaatatgtaagtaaatatgcatagaaaacaaaggtttattaattttttctaggtaatatctcgtaataaataggttgaaaggaaatgtcgttaatatgatagaaggacaacagcaaacaaatgaattaaaaaagacgatgaaaagcagacatttgtttatgatttcgctcggcggggttatcggtacagggttctttttaggaacaggatacacgattagccaagcaggagcgattggagctatcctttcgtttatcgtaggtggcttcattatgtacttaacaatgctttgcttaggggaacttgcagtagcaatgccagtttcgggttcgtttcagacatatacaacaaaatttattggccctggtgttggtttcgcttttggatggttatattggttgggctgggctgtaacggttgcattagaatttttgtcagcaggtcagcttatgcaaagatggtttcctgattctcctgtatggatctggtgtgctatatttgcccttttattattctcattaaatgcactgtcagctaaagcgtttggtgaagcggagttttggtttgccagcattaaagtgttagctattattttatttatcgtgcttggtggagctgctatgtttggttttcttccactaagtaatggagacagcgcaccgcttttctctaattatacggctcatggcgtgtttcctcacggaattagtgccgtgttgattaccatgattacagttaacttttcattccaaggcacggagcttattggtgtagcggctggggaaagtgaaaacccagacaagactgtaccaagagccattaaacaaacggtatggagaacgcttgtattttttgtactagctgtagctgtcttagcgggtatgattccgcttgaaaaagcaggcgtagttgagagtccatttgttgttgtatttgaccaaattggtattccatatgcagcagatattatgaactttgttatcctaacggcactgttatctgtagctaactcaggtctttatgcagcaacgcgtatgctgtattcattgtcaaaagataacatggcaagttcagctttcatgaaagtaaataaacgcggtgtgccgatgaatgccctgcttttaacattaggcattgcgcttttatctttactttcaggattctttgctcaagaaacagtatttgtatggctcatttctgcagcgggtttaggtgcacaaatcggctggattacgattgctgcatcactgcttgcatttagaaaaagatatataaatcaaggagggcaaatcgaggatttaaaatttaaagtccctctttacccggtattacctttaatcgcattagtattaaatacaatcgtattgggaagcatggcatttgatgcagaacagcgaatggcgttgtatgtcggtattccactagcgctgctgttttatgcttattatcatgcacgtgtaaaaaagaaagttgatttatctatcagccgtcaagaagtgcagcttaaagacgacaaaaaagtaattttataaaaatcaaaagacgcaaaagcctaggtttttgcgtctttttttattgattatttgtaaactagtaataaaattaagttgacaaataaaaagaaattattgcaaacttaaagcaatgaaaagagaaaggagggtgaatatgaaaccgaaaacaatggcgtatgtttccttatttgcagctttaacggcgattggtgcatttataaaaattcctattccctacataccgtttactcttcaaattgttcctgtttatttagccggtgcgctgttaggtccgcgtttaggtttgtatagtcagctatgctacataggtattgggttaatcggtgttccggtttttgcagaaggaggaggtttagggtatatcttcaaaccaacgtttggctatttaattggctatgctatgggtgcatttatgaacggctaccttattcaaaaatatgacttaaagaaacctttttctatcttttcagctaatttatctacgttagctattgtgtacgcagtcggctgcttctggctttacggagcaatgaaatggataattgaaaagcctctttcactgagtgatacacttctttttggagctgttttgccaatgcctggagatcttttgttatgtattttatgttcagtgctgattcaccgaatgcagcctcaatttagtcgtttgtcatcaaagcgggtcaaagcggggtaactaagacatagaaaaaaaggagagaaaaaaatgggcaaagcgtattttattacgggaactggaacagatattggaaaaaccctggttacaagtattttgtataaagtacttggtcgtctaggaataaaaacgacaatttgcaaaccatttcaaactggctaccaagacgaaattggaggttatccagatattcactggtttgaaacaaggcttggagtagcagatacgggtatttatcagttaaagccggagacgtctcctcatttggctattgcactgagcaacaagcaagtggagccttcaatcgtcttaaaacgcattaatgaattaaaaaagaaatttgatgtagtgctcgtagaaggagcgggaggtcttgccgtgcctttaattgaggaggaaacaacgttttatatgacaaaagatttgatgatagatgcacaaatgccggttattgctgttggaacgacgggattaggagctattcatgatgcgctttctaccttttcatatgcaagtgagcatcaccttaaaatcaacggactcatttttaatcgttttaatcacagcagtatcattcataacgacaatgttcgaacgattgaaaagctgcttcaaatatcatctctaatgaccgttccagtattcacacatatcgatgaagagttagatgcatatattgagaaaatgatgaggcaaaaaagtgttattcaacatattcaggaggtgtttgactgtgccgtatcaaaaagctgagctggagaaatgggataaagaatatgtatggcatccgtttacacaaatgaaagcttatcgtcaatccaaccctcttattattgaaagaggagaaggaagctatttatatgatgtagagggaaacaaatatttagatggatacgcttctctatgggtgaacgtgcatggacataatgatccggaattaaatacagctttacatatacaagtggaaagattagcgcattctacgctgcttggatcggcaaacgttccatccattttgttagccaaaaagctagcggaaattactcctggcagcttatcgaaagtcttctactctgatacaggctccgccgctgttgaaattgcgttgaaaattgcctatcaatattggcaaaatctcgactctgtaaagtacaaaaacaaaagtaaatttatctcattgaatgaggcatatcacggagatacaatcggggcagtcagtgtaggaggcatggatttatttcatcgcatctttaagccattgctgtttgaacgaattcccgcaccttctccttatacttaccgtatggaaggatttgaaacggaagagcaagcttcagcttactgtattcaccagctagagaagctcttgcagaacaaaggggaagaagtagccgggttgattattgaaccgcttgtgcaaggagcagcgggtattattacccatcctcccggttttttaaaacaagtagagctgctgtgcaaagcgtacggggtattgctgatttgtgacgaagtagcagttggatttggacgaacaggaacgctgtttgcatgtgaacaagaagatgttgtaccggatattatgtgtgtaggaaaagggataacaggaggatatatgccgcttgctgctacgttaacaagcgaaaagatatttaatgcttttttagctcatccggatgaaaataaaacgttcttccatggccatacgtatacgggaaatcaattagcctgtgcagtagcgcttaaaaatattgaactgatagaagaaagagaattaatccgtagtgtaaaagaaaaggaaaaagtttttaaacgctatctattaaagctttatgaactgcctaatgtgggagacattagacaacgaggtttaatggcaggaatcgagattgtgaaagaccgtcaaacaaaatcgatttttggagataaaaaagtgatgggagacattattttagccgctcgccaaaaaggtttaattattagagagctaggtcctgtgattacgatgatgcctattctttcaatgacaaacgaagaattaaaaacaatggttgaaattgtatatgaatcaattaaagaagtaatcgcacgtcatacagtgagttaaataacaagaggataggacaaaagttttttatttagttgaaaaaagatccgaacgatgaagcgttcggatctttttatggttatggtaacgtgaatgtactctatttagctgcttctagcggttgattggtgtagttatctctcaatctcttcttttttttatcaataaatatttttaatacttgataggcgaagtgatcgtacatgctgattttcatcttttaatagaagagtttgttcgagtaagtttaagttttgaatataaccttttaccgtttgaacaaaaccgttgttttgatagttaatagttaataatttatttgtttttagcgcttttaaaatcatacctattttctcctttcttatatcgtagctgacgaaaaactacaaaataacgaagaagcattggaggcttgtattatttataaaaatcactctattttttataaatgctctcctgctactaatagtagagagcgatggtgaaaaatagatgaaagataaaggataaggtttgatttattgtaatgaactgacttttcctttacaaatacctatttcaaatttctttttagtgataaaatactgttagtgaaataactacttcttttcattaaagggtaagaacgggttatattgatagagttttagttctctatttctagtaatgaaataagagatagagaaatagactaataaaaatcaatcaaggagtttttttatggatcagagttttattttaaatcttttagaaattttactgattaacattgtactgagtggcgataacgcagtcgtgattgctttagcttgtcggaatcttccggacgagcatcgaaacaaagcggttgttttcggtacattaggagcggttgtattacgtgtagggctaacgtttgtcgctgtctatttattaacaattccatttttaaatttcatcggaggcctgcttcttctatggattgcgattagtcttttaaaaggtgaagatgacggagatattaaagcgaattcaactctagcaggtgctattaaaacaattattatagcggatcttgttatgagtttagataacgtagtagcggttgcgggtgcggctaacggcagtattctactcattatccttggtcttgttatcagcattccgttaatcatttggggaagtcagcttttaatgaaaattatggaaaaattcccaattatcatcattgctggagcagcgcttcttggctatactgctggtgaaatgatctttaaagacaaagcggtgggacacgtattagaagggttaaatccgcatttgcatacgattattcctattttgttagctattttagttgttgttgttgggaaacttagcggacgttctaaaaaagaaacgcattaatcctaaaaaagaggttgggacaaaagtatttaagatgaagtgaaaaacgaaccactaatcaaacattttgattagtgattcgtttttttgttgggatgaacgtaggcttcatttgtttagatccatctagcagttgattggaggacaaggcgaagactcctgcgggaaaagcggaacagatgagaccccgcaggagcgtacgcgacgaggaggctcatcggccgcccgcggaaagcgaagtcttgtacggaaatcaactgcggtgtcataagcggttcagctcatgtatcccatttattcgtctttagattgaattcatctggctatgtctcaacctctttttttattacttagctaatggaggtgcggaattaacgtcttgtactgtttctacaggaggatgaaattcattttccattttcgatacaactacagttgctacaccatttccaattaagtttgtaatggcacgagcttccgacataaagcggtctaccccaattaacagcgcgattccttcaactggaatcatcgggaatgcagcaagcgtagctgctagtgtaataaatccagagccagtaactccggcagctcctttagacgttaacattaaaataccaagtagcgtaatctcttgcattaacgacaggtcgactccatacgcttgagcgataaagatagcagccattgataagtagattgctgttccatctaggttaaatgagtaaccagttggaatgacaagtcctactacagattttgaacatccgtacttctccattttgtccatcatttttggcagtgcagattccgaagaagacgtacctaatacaagtagaatttcttctttaataaaagcaatgaatttaaaaatattaaatccataaatcttagcaatggttccaagtacaaatacaataaataagaacatagtaatgtaaacagatcccattaagaaaccgagtttttgaagagagcctattccaaagttaccgatcgtataagccatcgctccaaacgcggcaataggtgaaagtttcataatcatattaacaattccaaagaaaatatctgtacagcgttcaaagaatgtaatgacaggagccgctttttcgccgagtgtagctgtagccattccaaatagtacggcaaagaataagattggcaataattcaccatttgccattgcgccaaatacgctgtctggaataattcccatgataaactccataaagccatgctccgcttcagctgcttgctgcgtatattgagtaacatcagctccgcttgcgccattgatattaaagccagccccaggtttgataaagtttacaacgataattccaattgctaaggcaaaagtagtgacaatctcaaagtataaaagagctttacctccaattcgtcccactttctttaaatctcccatgcttccgataccgatgaccactgttaagaaaataattggggcaatcaccatcttaattaatttaatgaagatatcagccaatacttttaatttagctccaaattcaggaaacatgaagccaattgcaataccaagaaggataccgataacaacttgaacagttagatttttaaaacttaatttcatacgtaatgctcctttcgagaatgtttttgttaacgtttacattattcttatccttatattaactgataattttaactatttatatttctggtgataatgttctttttggtcattttggtcaaaaaaagtgatgaacatatagtcatcactttttgctttcgatattttttatttgttgaatgatatcaagcgtttgttttgtggcattgttttcaaacgattgataaagagagttaaactgttttttccattcagctttttgtaaatcatttaagtaataaacgcgcatgccagatttattttttatttgctgcagctgttcatcgttcatcatttttgattgagtccaaatccagttagttgtttctaccattgcatcacttaatagttgttttacatcttcagggaggctgtcccaatacttttcatccattagaacagcgtagcccaagtatccatggttgctgatggtcatatatttttgcagctcgtacaaacgttttgaataaatattagaaatggtattttcctgtccatcaaattcctgtcgttcaagggattgatatactttattaaacgagacagcctgaggcttggcgccaagaagttcaaattgttttttgattacttcacttggcataatgcgaaatgtttgaccttgaaaatctgctggatggagcaaaggtttcgtattgctagtcatttgtttaaagccgttgctccataaagcaagccctttaatgtttttctcttgcagcgtactcaacaaatcctgtccgattttaccggtaaacacttgttttgcctcgctgtaatcatcgaaaatgaagggaagatcaaaaagttgccacgtagaggagaggtcgcttagctttgaaatggaaggtgcaatcatttgtacatcatttcggcgaagggcggcaagttcttcgtcgtctgaatacaatacgccgtttgaatatacttcaattttaactttaccatccgatttttgattaacgatttcagcaaatttttgagcggctaagccttttggagtattttcagctaccacgtggctaaaattaatcacaatttgcttatttaatcctttttgctcatcgtcatgatacacattatcctgatttataaccgtatactgcaaaaaaacatagatcatcaagaaaacgctaacaatgatacttgcccctataaacatcttcaaaatgtccaacctcacgattcaataatttttctctacaaatattctaacacgcaatttctcaacgtggtaaaattaaaataaacttcaatcagcagtaggtgttccgctatgatgcgcttatcgatgcaaacgaaaatgacggggttaatcttttttatcgtggccttttcgttgtttttagcaagtatcgtggtaattaataattttgtacagtcaaaagaaaatgatttagagcaaagggctttaatcacttcgagaacagttgctgaaatgcctgaaattcgagaaaaaattgaaaaagatagtaagaacattaatcaaattgtagagccgattcgcattattcacggtgcttattatgtagtggttatgaatatgaatcatgaacgtttgtctcaccctttgcaaagcatggttggaaaaacctctaaaggagatgatgagggacaggcgtttgcagaacatacctataccgataaagcaaaaggagaaggcggaatggtcattcgctcttttgtgcccgttgtaaacgatcagcatgaacaagtaggagtggttgtctcaggctatcttcttccgaaatttacagaggtcattttaagtttaaaaaaagaaatctttcttatctcaggtcttgctcttttctttggaggatggggagcgtgggcgcttgcatctcgtatcaaaaaagagatgtttgaacttgaacctcatgaaattgctcgtttgttcgtagaacgaacggagacctttaatgccatgcatgaaggagtcattgccattgataaagaggagaacatcactatttttaatcataaagcgaaaattatgatggatgtacccgatgaggtaattggaaaaaagatctatgatgtgattccagatacaaggcttccagaaattctgcagcttaatcagcctgtttataatcgagagcttcaagttcgaaatttgaatattttaagcaatcgtgtgccgattaaggttaataatcacacagtcggtgcggtcgctgtttttcaagacagaacggaagttaaaaaattagctgaagagttaacaggagttaaatcatttgtaagcgctcttagagttcaaaaccatgaatacatgaataaacttcatacgattgcagggcttatccaacttggaaataaagacaaggctcttcagtatgtttttcaagtgtctgaacagcaagaagagctcacccaatttcttcataagcatattaaagatgaaagtatatcgggattgctgttgagcaaagtcagccgtgccaaagaacttggaattgagttagctatcgatcgccacagcgagcttcactcatttcctccttacttagatcatcatgattttgtgattattattggtaacttaattgagaacgcttttgattcgtatcaacatatggagcgtcgtgaacggaagatctatataagtatggaacaaaatgacggcattctttctatattagttgaagataacgggtgtggcatgaatgaggatcaggtagcgagaatctttgatgaaggtttttcaaccaaagcaaaggaaaatagaggaattggtttgcatttagtaaaacaaattgttgaaaaaggaaacggtcagatcgaagtagagtcagaattagatgttggaacgacttttatcattacattctttttatagggggagtgggaaatgaataaaaaagcatggaccgtgcttctcatagaagacgatcctatggtacaagaagtgaaccgccaatttattgaacaagttgaagggttcaccgttatcgctgcagcttcgaatggtttagagggggtacagctcattaaacagcatcagcctgatttaacgattattgatatgtatatgcctagtcaagatggcttaaccaccttacagcaaattcgagcaaatggctataaaacagatgtgatagcagttacggctgcaagtgatattgaaaccgtacgcaaagttcttcaatatggcgctgtggattatattatgaaaccgttcaagtttgaacgaatgaagcaagcgcttgagcagtatcgttcgtttcaagttaaaataagtcaaaaagaacatattactcagtctgaattagattctatgctgtttcagcaattcgaagaaaaagccgatttgcttcccaaggggctaaatgcggttacgttaaggaggatacaacaatatctttccgaacaaaatcatccaatttctgctgaagaagtggcggacggcgtaggaattgcgcgtgttacagcaagaaggtatttagagtttttagaacaggaaaacgagctgaaattatcagttgaatacggcagagtggggagacctattaatcgctatatgttaaaaataaattaaactatacagaacagcttttatttggaaaagctgtttttttgcgttagaaagtatatctttttctctcctagaacaaattaaggtatacagttttcgctacccaaagaatatttcgtgcggtcattaatccataaaatgtccctgaaaagggattaatggcggaaaaattggggaatatgcactttgacatttaattttaacacaggaaggttttgaaacatggacatatttttagccgtcttaccagccatattttggggaagcattgtgctttttaatgtgaaactaggcggaggaccttatagtcaaacgcttggaaccacattgggagctttaattttctccatcggtatttatatttttgtacaccctacgtttacacctttaatctttggggttggagttgtatcggggctattttgggcagttggacaaagtaatcagctgaaaagtattgatttaatgggagtttctaaaacgatgcctatttcaactgggcttcagttagtttccacttcattgtttggagtaattgtgtttcacgagtggtctacaaaaacttcaatcattcttggtgtgctcgctcttatctttattattgtagggattgttttagcatcacttcaaagcaaagaagagaaagaggctgaagaaggaaaaggaaacttcaaaaaaggaattgttattttattaatttcaaccgttggttatttagtttatgttgtagtagcccgtctatttaatgtagacggatggtcggctttattacctcaagcgattggtatggttattggaggagtattgctgacgtttaagcataagccatttaataaatatgcaattcgcaacattatcccaggtcttatttgggccgctggtaatatgtttttattcatctcacaacctaaagtgggtgtagcgacaagcttttcgctttcccaaatgggaatcgtcatttcaacattaggcggaatcattattttaggtgagaagaaaacgaagcgtcagctagttgggattattattgggattatattgattatcatagcaggagtcatgttagggctcgccaaaagctaactaggaggttattagcaatgtataaagatttagaaggaaaagtagttgtcataacaggttcatctaccggtttaggaaaagcaatggcgattcgttttgcgacagaaaaagctaaagtagttgtgaactatcgttcgaaagaagaagaagctaacagcgttttagaagaaattaaaaaagtgggcggagaggctattgccgtcaaaggtgatgtaacagttgagtctgatgtgatcaatttagttcaatctgctattaaagaatttggaaagctagacgttatgattaataacgcaggaatggaaaatccggtttcgtctcatgaaatgtctttaagtgattggaataaagtcattgatacgaacttaacgggagcatttttaggcagccgtgaagcgattaaatattttgtggaaaatgatattaagggaacagttattaacatgtcgagtgttcacgagaaaattccttggccattatttgttcattacgcagcaagtaaaggcggaatgaagctcatgaccgaaacacttgcattagaatacgctccaaaaggtattcgtgtaaataacattggaccgggagcgattaatacaccgattaacgctgagaaatttgctgatcctgagcagcgtgcagatgtagaaagcatgattccaatgggatacattggagagccggaagaaattgcagcggttgctgcatggctagcttcttcagaggcaagttatgtaacagggattacactctttgctgacggcggtatgacacagtacccatcattccaagcaggacgcggataagaaaaaacgcactctatgatagagtgcgttttttagttttcctgagcttttttgggattcttaggagctgatgactggtgttgaattcgtaaaaaaagcaaaatcaaaacgatgcagccagtgatgctgtacatcccaacaataagcggttgctgtgtatctgttccagaagtaatgccgtgatacagtgcgagcaaatagcctggaaaagcaagaaaatgaatggctttccatgtttttctccccagctgtcttataaaatcggatgtgataatcagtacaaataaaatgtagagtgaaatagtaccaagacctgtgctaattggtttgtaatcggaagtgaacggaattaaaatgtcagaaattgaaaaatgaatagattgatccaatgataaaacaagtccgtgaatcatgccaaataataatccgaaccaccctgatgattgatgaaccagcaaaagctgtttttttcgttttggtttaaaaaatgaaaagctgtgagaaatgccagcggcaaccgatacaaacatgagcaaataagaagttaagccggctgcccgaatggtattccaaacgggaaagtgggcactaaattgcgcgaggagagtagccataatggtatacctgacctttcacatttttttcgattaacacttcgccttcttttgtaaccgcaattacctctaaagaagggtgatgcattttagctaatcttaatccggcgtcccacccgagaataagcatgcattttgcatagacttcagaaacggtcaagtcttctgaaacaaccgttacttgcagaagctctgatgaactaggcttgctgattctgccgtcaataatatgatggtgagtgtgtccgtttactttccacaatcgcttgcccacactgcttgtggcaatgccgctgttgctctttactttaatactcatgagattttttgataaatcaaatggatgagagagcgcaatggaccagtgcttgctagcaggcccccacgttacaatatcaccccctccatcgattccaccaagtgaagttccttttttctttaattgattcgccatttgctgaatgctccaaccttttgcgattccgcctaaatccagaccgacattagaagcaagctgaatacttctcattcctttgtgaatcataatagggttaacagcatcaaaagctgctatttcttgaggaagctgattgttaggcagttgttcaaaactttggttatatcctagagtttgaatagaatgataaagaaatgggttgaaaattccgtttgtctcattgtaatagtaagaggctgtttttacagcttcatacaacatttttgacggtaaaaataatcttccgttcagcgaattaagctgtgaaagctcgcttgttggaagaaagcggcttagggtttcttctacaagataacaccagctctccacttttttgattacaggtgtttccagctgatatacattaaattcggtattcatcgctttaaatgagtagctcattacatcacatccttaagaaggtcttgattgcatagagggatcattattattcccccagttatcctggccattggaggaattatcatttgaccactggtcttgctgattactcgaatcatcgtctgaccattgatcactttgctcattagaacggtcatttgaccactgatcttgcccgttagttccattgtccgtattggagtcaggtcctgaatttggaaataggtccgtctcatcttccgtttgggtttgcgatgaattactggctgatgtatcgttatttagtgctgtagctgttgaatttgtttgatcatatttttgagaaagtcctacaaaagtggtaaatgcagcaacgctcgataaaccaaccatccattttgtccatttattagctgccattgatatgctccttttatctttcctattttgcaactgaacactgaagaaaaactgcaatggaaggtaacatacatcgttcaattgttatagttcaatatagacagagaaaatgaaaaaatagtgaaatagatgtagggcggattatttttgtgggggaattcagcgaattattagattaaaaaaaggttgttctttttagaacaacctttttttaatcagcggtaaatcttactaattgatacgtaataaaccgttaactgcacaagagaaagaagcaaaagaacggcaatgggatagaagctaaaagaattaggtagcagcggataaaaagctattaatatagcacctataggaatagaaaataggagaaaaacaaaggctttcttacaagcttctgctgttatcatcttttcacgttcatcttcttctgcaaattcaaaagggaacaataaaggcgaaacgttcttcgtctttttacgcgcgcggtagtaaaaaaatgagacgattaaaagcacaattaaagaagcaaaagaccctatagacatagtaatttcccacgggggttcagggtgggtcataacttcactaaattgaatatttaggcttaaaaaatcatataaaaaccaacctacgcacaacagagacactacattcaacaaataagatttaataacattactcaacatttttctcctccttttgaagtgtaaaaacatcttccatttttaattgaaagacatcacaaattgttaaaccaagtagtagggaaggaacgtaatttcccttttcaatagctgcgatggtttggcgagtggctccaactttttcagctaaatctccttgcgtatatccatgtttagctctaagctcttttacgtgattaataagagtcaatatgatcccccgctgactttttaataaatttgttaagttgatttaacattatgtaaagttaatttaacattaattggattatttttcaatgattaatggataaaaaatacaaaaaaagatcctagaagagttcttcaggatcttttttgttaataaatttctttaatgccagacaaacgaatggaaaaaatgttttgtttttcatctcgtagggagagggtttggtcggttaggtttaaattttggatttttcctttgaaggtttgaagcaggccattttcgtaataattcacggttacatgtttgtttttctttaacgcttttaaaatcattaattcatctcctttcatgtgtgcatctgttatgaaaagaaagctgtagcttaagcataagaatttggagaatgctcaaggcagaattattattatacagcaagatgagaatagtttgtagataaattgtgaaaaaatgcacaagtttgcagtacgggtgttgcaacagaatacagtatatgagggaagaaggggttttatgataaaaaaggtgattttagtttatttatttgtgggtattaggtaaactagtagatgaatttaaagaatctatctatggttgtgaaggctaggatttcatttaattttcattttctatgagtataatgataaaggttttctatatgttctttgtgaatctactcataaactaatcgagaaaggaaaatcaaaatgaagcgaatcgtttctaagccgctgcactatttcatattagccgctgttttaatgtggataaagtcgtatgtggcttataaaactgaatttaacttaggcgtaagcggcgtaatgcagcaaatgctgttgttcataaaccctgtgagttcagtgctgatttttttaggaatcggcttattttttaaaggaaaaaaagcaggagcttggatccttgcaggcagtttcattatgacgctgctgttatacagcaacgttctctattatcgcttttttaacgattttgtaacgcttcctacactgttgcagacaagtaatgcaggaagtatgggcggaagcattatggatttattaaaagcacatgatgttttttattttgttgattttattatttattttttcttcttttttagtaaaaaaattgactggcataatgaaaaagtatcggttaagaatgctgtaaccattctttctttaggattcatggtcttttctgtcaacttaacattagcagaaattgatcgcccgcagcttctatctcgaacttttgaccgcaattatctagtaaagtatttaggcgcctataattatacgatgtatgacggtgttcagactgctcaaaactctaaacagcgagcttttgcaagcagcaatgatttaacaaacgtcgttaattttaaaaacagtcattatgcggagcctaattccgtttattttggaaaagctaaagggaaaaatattattaaaattcatttggaatcatttcagtcttttttaattgattacaaattaaatggtcaggaagtgacacctttcttaaattcgttggcccatggaaatgactttacgtattttgataacttctttcatcaaacgggacaaggaaaaacatcagatgctgagctgatgatggacaactctctatacggccttcctcaaggttccgcctttgtactgaaaggaagcaatacgtatcaggcagcaccagctattttggatcaaaaagctggctatacgagcgctgtgctgcacggagactataagacgttttggaaccgtaacgaaatttacaagcagttcggtgtggataagttctttgatgcaagttattacaatatgacgggtgaaaataaaattaattatggcttaaaagacaaaccgttctttaaagaatctgttccaatgctgcagtctttaccacagccgttctatgcgcatttaattacgttaacaaatcattttccatttttacttggaaacaatgaggcaagcatacagcctgctaacacgggcgatgcaacagttgaccgttatttccaaacggctcgttatttagacgaatcattgcaatctttcttccaagaactgaaagcttctgggctttatgataattctgtgattatgatttatggagatcactacggtatttctgaaaatcataatgcggcaatggaaaaagtaatgggaaaagaaattacgccttatgaaaatgctcagctgcagcgtgtacctctattcattcacgttcctggagtaaaaggcggagttaatcatacgtacggtggagaaattgacgttgtgccaactcttcttcatttagtagggattgacagcaaagagtttatccaatttggcacagatttattttctaaggatcatgatgatgtagtggcattccgcaatggcaactacgtatctcctagatatacattagtggatggaacgtattatgattctaagacgggccaagcgcttaaagaaaataatcaaatgaaagcttataaacagaaggtagcgaaagaattggagttatctgatcaagtgctttatggagacttgcttcgtttccacaagctgaaggatttccaaacagtcgacccttcgaaatatatgtacgggaaagaagaaacagaaacatcagctaaataaagctaaaatcaaaagaacatgatgacttctgcaaagcagaatgaacatcatgttcttttttactgtaaactattcatcaataaatttctttaattcccgataaacgaatagagaaagtattttgctgttcatcttttaatgaaagcgtttggtctgttaaatctaagcgctgtacttttcctttaaacgtttgaagcaaaccgtttttataatagttaattgtaacggccccgttttttcttaatgcttttaaaatcatcttcaaaactccttccatatttaaaatgtttatgattaacgagctgtaacattcattttcatttgcatatttttattatacacaaaaatagaaagcgttttcacttaaagtttgaacactttgtgaaaactttaacagagaatgtgacaaatacatacagaaactaatttatttgtcgtattcatcataaaacacatttatgaaaggagtgttaagaacgtgttaaaactttatggatggaagaatattataaaatatcgtttgaaatgtcgtagtgaatccattcatcgttcgttacatttccgcccatttttctgtaaagcatttgggctcctgtgttatcataagccgtttcccaagacatagctgcatactgatgttcttttgtatactggtgactagtcgaaaataacttttctccaattttttgtcctcttgctttttcagtaacgtataagtcatttaaaatcgctacaggctttacacgcgtggtgctaaatgtaaaataaagcgtcgaaaaacctactgcttcgtcattctgagtcgcgataaactgaacgccagcatccggatgctgaaataagtgattaattaaatttctcagctgctttttggtaggctgagggcgcttgtaaaaatcaacaatgtattcgttcattaatgaaataagtgcttccatgtcagcggcattagcttgacgaattgtaatagtagtcattaaatcttctcctttttaatcaaatgatctacacttatagtaaaagaaatgtatcccctctaaaagagccagatttgaaaaataaaatagggacagatgaaaggaaatagcgtgaagttcacacctttattaaaccgcaaagatgatatgcctttgtatcaacagctatatgaatatataaaaaaagaaattgtatccagcagggtggaagtaaatgacaaactgccttctatccggtctcttgctgattacttaaacgtaagtcgaaatactgtagatgtggcctatcagcagcttttagctgaaggatatgtagaaagcaggcccaaaagtggaatgtacgtaacgaatacacagtttgatttactgcaaatagataaaaagccggctgtatttttacaccctcactcagaaacaaagtcgtgtacctatgattttcggtatggaaaagttgatagccgtttgtttcccttgaatgagtggaaaaaacgatacaatgaaagtcttcaaacttatagagaatctctgtttacttaccaagaaagtcaaggagaagaatcactgcgaaaagaaattgcgacgtacctttatcaatcaagaggagtggtttgttcaaaacatcaaattattattggagcaggtacgcagcaatcactcagtttattagcgcagatgctaaaaccaagcatcagggacattgcctttgaaaatccttgttatgacggggctagctttgtatttaagcagcatggattttccttaaaacccgtgtcgcttaataacaaagggataaacatccaggagctttatgacagcctagcacgagctgtttatgtcacaccatctcatcagtttccatacggaatgatcatgcctgtttcaagaagaatagagcttcttaaatgggcgaatgaccgcaacgggtttattattgaagatgattatgacggagaatttcgttataaaggctctcccatcccttcattgcaaagcttagacactaaggggcgcgtcatttatacaggtacattttcaaaatcttttatgccttctttaagaatcagctaccttgtattacctgaagttcttctaaaggaatatcatgaacatttctcattatacgagcaagctgttccaactctccatcagcggacgctcgggctgatgatgaaaaatggagagtggagtaagcatttaagaagagtgagaactgtttatcaactgaaacacgttactcttttagcagctttacagaaagagcttaacgaaaacattacgatatcaggtgaatctgcaggtttgcatatacttgtacgcgtgcacaacgatatgaccgaacagcagttaattaacgcagctcgaaagcaagatgtctccgtctacggtacctctcgttattggcttacggaagtacctaaacaaaagcctcatgttttgttaggcttcggaagtttggggagagaagaaatagaagaaggaataaaacgattaaaaaaagcttggttataaatccatgctcgttttttcggtttcttgacaaaagttgcctattcctttagactttttcgcatatattttaaattatctgaaaggaggatagggtaatcgaagctaactgctagtggacaaccctagatcaaacaatgaatcctatccaacaaattttacatacatttcctgtgattgtattagatggtgcaatggcaactgaactggagagatatggttgtgatttaaacgacagtttatggtctgcaaaagtgctgatggagcagccggaattgattaagagagtgcatcaagattactttgcagcaggagctgactgtgcaattacagcaagttatcaaagcacatttgaaggttttgctaaacgtggactgagtgcagcagaggctcgcgagttaattcaagcatctgtaaaaattgcggctgaagcaagagatgaattttggcagcaagaagagaatcgtcttaatcgtcccaaaccaattgtcgccgcttcgctaggaccttacggagcatttttagcaaacggatcggaatatactggacagtatgacgtaacagaagaagagttaatggaatttcatcgtcctcgtatgaaagcattaattgaagcaggagcggacgtattagcttgtgaaactattcctaatttaatggaagcaagagccattgcgaggctgctagaagagtttgaaggagcgtacgcatggattacgttcagcgcaaaagatgacctgcacattagcagcggaacattaatctcggagtgtgcacgctatctggattcctatgagcaagtagcggctcttggagttaactgtacgccgcctcaatatatttcttcacttattaaagaaattaaatctcaaacggataagccagtcattgtgtatccaaattcaggggagcattatgatgctgaatctaaaacatggaacgggatatctgcaggcgaaacgtatggctgcagcgctcacagctggcatgaagcaggtgctcagttaatcggagggtgctgtcgtacaactccagatgatatcaaaggcattacaaaatgggctagaaaataacggattaaacaaagagaatgtgagaaaagttgtttcgctagcgttaaacacgaacgatctatcaaaaatagatcgttcgtgtttttttatggtcatggtgaacgtaggtttcgtgtgggcaggtccttctagctgttgcacggaaatcaacaaaggtgtcataagcagttcagctcatttatccccattttacgtctttagattcattttattatgttccaatctttttttcttgtaaaataaaagaatacaagttaaaaaatctttatttgaacgaaagaagggatgatgaaagtgaaagatattaaaaatatttattgtgtggggcggaactacgcactgcatgcaaaagaattacataatgatattccaacatcaccttttttattttccaaacctactcacgctctcgttgaagcagctggacaatcaatcactcttcctagcgaccaaggagaggtgcactttgaaactgaactgattcttcatattggacaatcttacaaagagggcataatagtggatgaacttgttgacgagatgacgattggattagacttgacccttcgagacgtgcagagtgaattaaaacaaaaaaagcacccttggctgcttgcaaaaggattcaaacgttcagcggtcgtgggaaactttattccatttgaaggagtagaagcatctaagaagaaagacttttcgttagtgaaaaacaatgaacgcgtgcagctggggaatattaaagatttgatttttgacttacaaacgattattgattttacaggaaaacattttggtcttgataaaggagatcttatttttacagggacacctgagggagtaggtccgcttactcatcatgatgagctttcacttaaatggggacagcaagagcttggttcttgcatcatttcctttcgttaacaaaaagaagcggaaacaaaagtagtttagttgaaggaagatccgaacgatgaatcgagattcttgatagagaatctcgattcatcgttcggattttttattgtgatggtgaacgtagattgtatatatttgcttctagctgttgattagagggcaaggcgaagactctgtcggggaaagtggagtggctgagaccccgcagaagggtaagtgaagttttgcacgaaaatcaacagcggcgtaccacgcagtccaaatcatttatcccatttgttcgtatttagattggcttgatttcgttatgcctcaatctctttttttacgaagttttaattttttagccttcagaatgaatttaatatccaatgggaaagctgtttctatctcctatagaaaacgaggtcctcagcatggtgctcttaatccttacaacggtgatttctattctgagtgtactagttatgccaaaatgtatcagctggatagaaatgtacacaacttctttgtttgttatgtttttaggatcggtaggagatgtatatcttgatggtaaatatgatctttatggattctttacaaaaggagtatccaaacagaagtgttttattataatgcatggaagacgctatactcgttgttttgctatccttttctttatatagcaatggttttaaatttaaaaatgatacgcaggcttcagattatcgataaacaaaaatagaaataaaaaaaagtaatgataaatcataaaaaaatgatattttattaatggctacatatgtaatatagtaaaaatagaaaataaacgaagcagcatataagcagggttaaaaaacatcaaaacgggaatcttgacattaacttcatgtttttaaccatgtattgtgaatgaatatacttattgctaaataatatgttgtagaaggaatttagtaaaggaggcaagaagatgtttaagcgtagtgaaaaaatccaaattcatggtgtaacgtttcacggagtcatgagcgcgaagcaaaaagccgccctgcaggaaattgctaatgtaacagacgaaaaagactgggaggggctaaaaggtgtgtattgcttaggcagtgtaaaggtgcaaggaaaagatgtgctaggcgtgtactatggccaatttaatgataaccttccaaaagagaagcgcaaacttcagtttgaaattgattatattaaatatacagtaacggaatgtcctattgtctttatcgatacaacaaaaaataaaaagcctcatcaatttgcttttatcattctgcatgaattaggccatcatgtggatcgtatgacaaatggaacgcttttaaaagaaggaaatagaacgcaagaaatgtttgctaatacgtatgctttagagaaatattcaaaaatagaaaagttccaaacaaagaagttgaaaaacattccatttttagaggaatctcttactcaatggaataaaactcctcatcttggcgcttattctcttagagttcaaattgaataattcacgagaatagttcctctctctccgtttttttattttcctatctttttcctcttactttcttttatccttccaatgaacaaaaaggatttaattacccataaagttttaaaagtttttatagtacgaattatttacactataccctcctgtaaattatgattattttaagaaaaaacagaaaattttaaagttttaaggtacaacttaatagtgaacaagcgatgttgtaatcgtatagacgaactggcatacatatgcgggtcatacatacaaacgaatcgcttccactgttatgaaagcggattcaaaaataggaggggtaataatgttagctattcttgggtttttgatggtttgtacatttatgtttctaattatgacaaaacgattaacgccgcttattgctttaatggttattccagtattgtttgcaatcatagggggattcacaagtgatattggagaaatggctttaaatggtgtaaaagaattagcacctacaggcgttatgttaatgtttgctattttatattttgggattatgattgatgctggtttgtttgatccagttgtaggaagaattttaaaaatcgtaaaaggtgatccactaaaaatcacaattggtacagctattttagttcttattatctcattagacggagacggaacaacaacatatatgattacgctctcagcgatgcttccgctttataaaaagctaaacatgaagcctatgattttagcctgtatcgctattatgggtagtggagttatgaacttaacgccttggggcggacctactgctcgcgtgatgagcgcattgaagttagatgcttcccaggtgttcacaccaatgattccagccatgattggtggagctatttggttattatttacggcttactatttcgggaaaaaagagcgccagcgcttaggtgttattgatattcaagacgttacaaatgctcaagtagcttttgcagaagcagccgctgctgaaggaatcgagtacaagcgtccgaagcttttatgggtaaactttgctttaacagctctcttattagtaggacttatcacagcagttatgccgcttcaaattctgtttatgattggatttgcaatcgctatcatgattaactatccaaatttagaagttcaaaaagagcgtatcacagcacatgctggtaatgtacttgctgttgtatctcttgtattcgcagcaggcgtattcacaggcattttatcaggtacaaaaatggtagatgcaatgggtaacagtttagtaggattaattccagatgcgctagggccttacatgtctgtgattacagccatcacaagtatgccatttacgttctttatgtcaaatgatgcttactactatggaattttaccaattattgctcaagcagcttcagcatacggtattgatgctgcagaaattggccgtgcttcattgattggtcaacctgttcacttactaagtcctttagttgcttctacgtatctattggtcggtatggcaaaagtcgagcttggtgaattccagcgctttactttaaagtggacgattggaacagcgatggtgatgcttttagtagctattattacaggagttattacgctgtaaagatcatgaacttaaaaacttatcaattccgcttttgggattgataagtttttttgtctaaaaagcttttggaataaggagcggatatacaaaaaattttgataaaataaaagaggaatagaactataaggtaaaggctaaaggtgcgatgaaatgaaaaaatggtttcaagtatcgctgcaaacaaaaatcgtaggtttatccgcagcattaatcataactgttattgttcttttagcgagtattttctcttacatgcagtttgtagaatctaaaaggcaagccgagcagctggctcttcaagcagccaaatcaatatcatttatgccggaagtcaaagctgcttttcaaaaaaaacagcccagtcgctatattcagccccttgccgagcaagtgagggaacaaatcggagcagcaagtattgtagttcaaaaccgtgagcaaatcatctattctcatgctaatcaaaaatggataggaaagaaagacaaagaggcggttaacgatagagcactattattcggcggatattatacgcttgacggagagggaaccacaggtcctgcaattatggggaaagcgcctattgtcatcagtcacggaaagtatacggacgtcgtgggagtagtgacggttgagtttttaaagtctcatgttcatgctcagctcattgcgcgcattcagcaaattatcctattttcactagctgttctattgcttggtatgatcgggggtatttttttagctaaaagtattaaaaaagatactctcggtcttgagccccatgaaatcgcttctttataccgtgaacgaaatgcgattttactttcgataaaagaaggaattattgctattgatcatcaaggctttattacgatgatgaatacatcagctaaaaatatgctaggactacagacggaatatttacatcatcatatcattgaagtatttccttatacgaatatgattgaagtgctagatacgggaatagcccgaagcgaccaagagatttttctgaatgaaaaaacgtttatcttaaacttaactcctattattgaacatcagcgaattgtaggagtggtcgctagttttcgtgataagacagaattaaaaagcttaatcaatacgatttcagaagtacgaaagtattcagaggatttacgagctcaaacgcatgagtttacgaataagctgtatgttttgtcgggtttgctgcagttagggcagtacaaagatgcatttgagtttattcaaaaagaatcagccgtacaccaaacacaaaaccgtattctatttgatcagatactagattctaaagtccaagcaatattgcttgggaagattggaaaagcatctgaaaagaaaattcacttttcggttgattcggagagtacactcgatacgctcccagaacatattgaaatttctcatctcattatcattattgggaatttaattgataatgcatttgaagcggtgagtcagcagtctgaaaaagaagtgtcgttttttattaccgatattggtcatgatttaattattgaagtgatggataatggacctggtgtatcagaagaagtactaaatcaaattttcacaaaaggtttttcaaccaaaggtacagacagaggatacggactggcaaatataaagaaaatggtagatgagcttggaggatctattgaagtgtataatcagccagaaggaggagctattttttcagtttaccttccaaaaaactgaatcatgagaagtaaggggagagttgaaatgttaagagtcgcaattgcagaagacgattttcgaattgctcaagttcaagagcgatttttattagaagtagatggtgtggaagttgtaggtaaagcgttgaatgcaaaagagacgcttgaaatgctaaaggagaagaaagttgatttacttcttttagacatctatatgccagatgaaatgggaacagatttactgccaaaaatcagagcgcggtttccacacgttgacgttatagtggtaacggctgccaccgaaaaaaacattgtagaaatctgtttgagaaacggcgtcgttaattatttgattaagccggttatgatggaatccttcattaatgctattaaacagtatcaagagaaaaaggaactgtttagtacgcatgaagaagtagatcaatcatttattgatgcgtactttggacatgtcaggacaaagccaaaagcggataaatctcttccttcaggtattgatggtatcacattacaaaagtcaaaagatattttaaaaagcatcaaaggaattacgatcgaagagatggggcagcacatgggagtatctagaacgacagctagacgatatttagagtatctagtatcaactggtgaatgtcacgttgaatatgattatgggattattggacggccagagcgcaagtactatttagcgtagcattagccttgaaggatggtatatatgatcaaaaagctcatgatagtgtttataagtgtattgcttgttagctgttcttctccctctaaaaaagaccgtattgatatgggggaaattgaaattgtggcagccggtgcaaaaggcggaggagcagacgcaacagtaagagccattcaacaagtgctaacggaaaagaagattgtgaaggtacccgtttctgttagtaataaaataggtgggcaaggtgaagaaggatggaaatatattaaacagagaaaagaagggaatattgtttccggaaattccagcttgctgattacaaataatttgctagggcaaagtcaattaacatataaagactttactccgctcgctattttaacatctgaatgggaggtcatcgtagttcctgctaactctcctatatataatttaaaacagctcatacgcacgttaaatcaaagtgaatccagcatgaaagtgggaatatcacctcgcttaggaaacgacgatcatttatcgttcatgcagctaaataaaaaagcaggcgtagactcttccaagcttgagttcttcgtttacaacagcagtcataaagtgatcgatgcactcgttcatcatcagctagatgtagcacctatgtcattatcagaagtgaaaaagcagtatgaacaagggcaggtaagaatactcgccgtttcttctcccagcaggctagaagagttaaaagagatcccaacgtggaaagaagcgggaattgacgtaacgtttagccattggagaggtctaatgggaccgcctaatatgaccaaagagcaggtagcatattggaataagacagtgtatgaaatggttcatacaaaagaatgggaacagctgcttaaagataacgatttaacctctttttataaaaatagcagcggtgctaaagtctttcttgaacagcaaagcaagctgtattctgacttaatgggcggaacaaatgatgaataaatataatagaaagaggttgggataaaaggattttagacggagtgaaaaacgaaccattgatcaagatttttgattcgtgtttcgtttttttgttttggtgagcatagtttcatctgttctgttccttctagcagttgattggagggcaagacgaagactcctgcgggaaaagcggaaggggtgagaccccacaggagagtaagcgacgaggaggctcaccggccgcccgcggaaagcgaagtcttgcacggaaatcaactgcggagtcaaaagcagttcagctcatatatctcatttgttcgtctttagattgaattcatttcggtatgtcttaacctctttctatcagtgtacatcttttaaatccaagttttgaatgaactcaataaaagcttttacgatgttaatctttaatgaatcctcatgataaaacatccatgtactgcgcgttaaaggctgctggtcttttgtttttaacgtgtatctgtaaatctcggctgcgtcatcaagcagcatactcggcaaaatcgcgtaaccgagtccgtttacaaccatctttttgcatgtttctgctttatccacttcaatactgacaaggggaggctgagagtaattttcagcccaccagttatcaacagatgtttttaaaaaacgatcttggtgatagtcaatccgaggtagattgggaaggttgtttatgtcgacaggctgtgcagacgcaatgcaaattgtttctttaaaaagcagctctttctgatcttgccagttataatcaccttttacaaacgcaatatgaacatcgtgcttataaagaagatgagccatgtcgctgctccatccggtcgtgactttgaattccacgtcgggaaatcgctctttaaataagcgtaatagcccaggtagcttgtagtcagtgaaaaagttagacactcctagacgtaaagtaccggttaattgatcatccatgtttaacacattttcttttattttttgaagcgtgagcagcatttcttctgcgcacttcactaaatattctccctgcggtgtaaactgaactccgcggcgtcctctgttcacgatctgaacatgaaattccttttccatctgctgcagtctatgcgtaagcgcaggctgagagataaacagctccttggctgcttttgtaatgtttttttctcgatacaacacttgtagaataagccaatctcgatcgtccatactatccctccagaaataaaaaaaatgaatggtttataataaaatttcgatattttaattatctctaaaattatactatagttaagaagaagaatgttcggcgtaagaaagaaaagccttgtagaaggaaggaagtagatatgaacgcaagaattatttttttacaatctatattttttattttattaacatgcgtgggaggatttcttctatcgttaacaggcttatccattggctggatgcttgggaccctcattttagctgctattctaacttttcggaagccgcgttttttatctcaaacaagcaaaaaaggtattccaaaatattggctgtacgcaggacagtgtattttagggattgaattaggtcaaaagattaacttgtctgtattaactacgtttcaatctcactggtccaccattacgatcatgcttttgctgtccgttgttttttctcttttatccggttatttgctatggaagttcagttccacagatttattaacaagctttttcggcacgactcctggaggaatgagcgcaatgccaggcatggctgaagaggtaggggccaatacggcaattgtaagcattattcaaacaatgcgcgtgtttttagttgtgcttgctgttcctttatttgtggtttattggggaagtaatacaggacggcatgcagtgtcagttaccccaagcgtttttcaatggggatcactgttatggacaggcgttttaatcgttacagcagtagtaggctattatataggaaaaaaactaaaatttcctgcgccttggttagtaggagggatgcttactgttgcgattgttcaaacagctgcttcatcgtacgtagggtataatcttcaagcatactggcctcattctgtgatgattttatcgcaaatttttattgcttcaagcattggttctcgctttcataaagaaatgtttattggcgtaaaaaaaattatggttgttgcgcttattaatacaatcggtttgatcgccgctatgttcgtatgtgcactagtagtctccaaaataactggaattgagcttatcacgtctattttagcgtttgctcctgggggcattgcagaaatggcgactacatccattgtattgcaggctgattcgacgttagtagtagcggtccaagtgcttcggattttaaccatttggctgcttcttcctccgctgtttcgattgtttcatcagtggggagaaagaaaaagaatacattcacacgtgtcataataaatatgtgaatgcactaggcaaagtaagagagagttttaaagagagaaatggggggagaaaagatgagtaataaagaaatggtggtcagtcagttcggggggaatgccggaaagtatgtcaaaagtaaaggtcatgcaaaaggcaaagatttagcggttttagcggaaattgctgaagaaaatagaggaggaaagctgcttgatgtagcgacaggaggaggacacgtggcaaataagctagcacctgtctttcaagaagtaacggcttttgacttaactcctcaaatgttgcaaagtgctgaaggcttcattaaagaaaatggttatgaaaatgtatcgtttgttcaaggagatgctgaagatatgccatttcaagatgacgagtttgatacagtaacgtgcagaattgcaccgcaccattttcctaatattaaacagttcatcaaagaggtgtaccgagtgttaaagccaggcggacagttcttgctcattgataatgtagcaccggaagtgaatgcttatgacgagttttataatcgagttgaaaagacaagagatccaagccattatcgtgcttataaaaagacagagtggctttctatgcttgaaatgcaaggattccgtacagaagtgctgacaactttctcaaagcgctttttatttgatgactggtgcgggatgatgaatgtttcggaagagacaaagcgtgagcttactcaatatatgctgaatataccaagcgggtttaagcagttttttgatatcaaaacaaatcaacagggaattgaatcgtttcaaggagaagcaatctttgtagcgtgttgcaaaaataaataacaagaagccaactcaccggagttggcttcttgttttacttatgctcgttggtttgaacgatttccaaaatattgcgtaatacggtctaaaataatcgctaaaataacgattgaaattccggcttcaaagcccgtgccgacttcaagtcgagaaactgcacgatatacttccgcaccaagccccggagcacctacaagagaggcaataacaaccattgaaagagatagcatgatgctttggttaattccggccatgatggtttttgtagctaatggaagctgtactttaaataatttttgttttgttgttgaaccgtaggcatttgctgcttctactaagtcagcgggtacttcacgaatacctagattcgttaagcgaatcgtcggaggcattgcaaagataacagatgagataacgcctggtaccacaccaattccaaagaagaaaagtgctggaatcaaataaacaaatgcgggcattgtctgcataaagtctaagattggcgtaataattcgagccgtcttttcgctttgagatgcccaaatgccaagcggaattcctactataatcgaaatcagtacgcttgttaaaacgagggctagtgtgtccatggtttcttgccagtagccaagattaagaataaataataggccaatcatcgataaaatagtaaatgaccattttttacttgaaaaccaagcaatgattccgacaattaagattaaaatcaatgcgggtggaaaggttagcactagtacaataaaacttacaataccatcgacaatagctgaaataacatcaaaaaaccctttgatattatcgtttaaaaacgtcacaaaatggtcaatccaattgccaacgggaattttaggaatactattcatttacgttcacctcattactatcagtaccagcgagtgcttcaattactcgttctttttttatgatgccgcgcagacgatggttttcatctacaaccggtagtggaaagcggctgataaccattttgtcgtacaagttttctagtagcgtatctgttgtaacagttggaatatccgtatctaatacgtctgctgtcagtttatcttgtttaatggcgcggataatatcatctgccgttacaactcctagaagcgtttttttcttgtctacgacgtagatgcttgaataaccagcttcttgcataattttaagcgccacgcgcggacctcggtctacggtaatagattcagcacggttcatcacgctttcagctgtgtatactttagctacattaacgtcttctacaaagcgctcaacataatcattggcagggtttgtcataatttcttcaggtgttcctacctgaacaacactgccgtctttcattaaaacgatgcgatctccgattcgaagagcttcatcaagatcatgggtaataaaaatgattgtacgttccattttttcttgaagctccagtaagaaatcttgcatgtctttacgaataagcggatctagtgcactgaatgcttcatccattaataaaatgtcagggtcattggcaagtgctcgggccagtccgacgcgctgctgcataccgccgctcagttcaccagggtattgattttcgtaccctttcaaacctactaattcaagcgcttcttttgcttttttttcacgttcggcttttggtgtaccttgaacttctaatccgtattctgtgttatcaagaaccgtacggtgagggaatagggcaaagttttgaaaaaccatgctcattttttttcggcgcatgtcgcgaagttcctctttgttcatttttactacatcgtcaccgtctaaaataagagatccagatgttggttcaacaaggcgattaaacatacgaactaaagtggatttaccgcttccagacaggcccataataacgaagatctcaccggatttaatttcgaagtttgcttgattaaccccgattgtcattcctgtttcttctagaatttctttttttgtttttcctttttgaagtaaatcaatcgcctttgacggattcttaccaaacactttggttatattttgtacttttaattttacgtgttccatatgtccacctcaattgttgttttcatttacgttcattactcttttgtccaactgtcgattaattttttatgtttttttacccatttctgtgctgcttcttcagggtttgaagatttttcgacttgtgacagaagaggactgattaatttatcattcatctgtgcattattcatccattttataacttgaggatttgtctttttaaattccttgcttgtcattgtgtaaatgttgtcaggatctccaaacgaatttttaggatcttttaagtatttgatatcaaagtctgcaaaagcccagtgcggattccacatagtcacaacaattggtttttttgcatcataggctttgcgcagttcgctgagcatagctgcctcagatgattttacaagcgtatagtttttaaggttatagtcctttaacgcttgttcagctaatccgttaatactggagcccgggtcaattccaatgactttgttatcgacatcggaagcaactttagcaagatcttctgttgtattcacgtctttcatataggttggaactgcaaatcctaagcgtgcatttttaagccaaggatcttcaatgttcacttgatctttatactttttgtaaaaaggcgcatctgttgtagggagccatggtgcaaatgaaatatcaatgtcgtcattagctgttcctacccaaacaccagctttctctaagaaaacggttctaaccttgtagcctcgatcttctaaaatgtgtttccacacgtacgtgtaggcaatgttttcagtatagttattcatgccgatggtaatggtttttttatctttaaatgcgccattaccgttgccgcaagctgaagtaataactagaagaaaacaaatcatgctgattaacaatagtttcttcatgcagtgtaactcctttataaagttttaaatcaatctgactgatatgtagaacggatgctaaacacaacgaagtgtatacccggtttttttagatggtaaacatagaaaatataaaatgtgaaatagaatgggtgatttttcggcgttataaagttatttttagctaaaaatgtacatcgtagttgcgagaaattatgggaaataaatggataaaataagtgactgtagaatcagttttacatgttatcactcttttttttactccgtcaacttcaagtgaagagtaattagccgataaagctttataaataaacgcagaaaagtatctttctattaaagatacttttccagaaaaatagttgcttaaagagcgttgtatcagcttttactttggatggtgaaaggaggagaaataacagtgagacatataaaaagagcgaggataaaatgataaaataaaaaaatatttttgaagccggcatgcgaccgatttttaattaaatttaaagattcagaaaattttatcttgcataatttgcgttgcttatagtaaaatgaatgaaagtcattcatttcataggtggagggaaagagttggttacaagcacaagtgaaaaatacgataaaatcttacaggcggcgattgaagttatatctgaaaaggggcttgataaaacgtcaatttcagacattgtgaagcgtgcaggtgtagctcaaggaactttttatctttattttagatctaaaaatgcccttgttcctgctattgcagagaacttactttctttgtcacttgaaaaaattaaagaaagagctaaaacagcaacagattttttaagtacattagaggtaatgattgatgaaacgtataaaacaacagatgaatatagagatgttcttgttttatgctattcggggctcgcctttgactattcattagaaacatgggaagctatttatttaccttattacaactggtttgaacaggtattaaatgaggcagtgaaaaaagatgaagtcatcaaacagcttaacgttaaatggacagctaaaacgatgatcaatttgattgaaaatgctgctgaacttttttatattgggcgagagcaagatgtcacacttgaacaatcgaaggaagaactttttcaattcttaaagcgttctcttgtgccatctatgtaatattagcactgctgatattacacctatcaaaatgactgacattcattcaaaatatacaattaattatcagaattataagtttttaaaagtttaaaatgactgacaatcagtcgttatttaataaggaggtatcttatggatcgtacagtcgttaaaacgttaactttaaatatgtacataaacggagagtggaaaaaagcagagaagcagcgtcctactgttaatccagctacaggtgaagtgattggatatgctgcagaaggcagcatagaagatatgaaaacagcgattacagcagcacgagaagcctttgacagcggaatttggtctgagacttctgcatctgaaagagcagctatcttatttaaaattgccgataagcttgaagaagcgaaagaagaattagcagcgctagaaacaatggataacggaaagccatatcgtgaagcggaggctgatgtggaagatgcggctgcttgttttagatattacgctggattaattacaaagccagacggtcaaacgtacagtgttcctgcacctatacaagcaatggttataaaagaaccaattggggtgtgcgggctgattgtaccttggaattatccgctgttgatgagcgtgtggaaaattgcacctgctttagctgcaggaaacacgattgtatttaaaccttctgaagtgacaccggttactcctacaaaactttttgagattttagaaagcgtaggattgccaaaaggagtagcaaaccttgttatgggagccggagatactgtaggaaatacgcttattcaagataagcgtgttgataagatttcctttacgggtggaacggtaactggaaaacacatcatgcgtcaagcagcagagaatgtaacgaaagtctctttagaacttggaggaaagtcaccgaacattatatttgctgacgctgattttgaaacagctgtagattatgccttatttggaatttttgcaggaagcggccaaatttgcgctgcaggttctcgtattttagtagaagaaagcatcgctgagaaatttattgaacgttttgcagagcgtgctcaaaaaattaaggtaggaaatggaatggatcaagagattgaaatgggccctcttgtaagtgaagaccatatgaaaaaagtattaaagtacatcggaattggaaagcaagaaggcgcccgccttgtatgcggaggcaatcgaatcaccagcagtggattgggaaaaggattctttgtagaacctacggtttttagtaacgttacgtcaaatatgaaaattgtgcaagatgaaatctttggacccgttgttgttattcaaacgtttaaagacgaaaaagaagctattaagcttgcaaatgatacggaatacggtttggcaggcagtgtgtttacaaacgacggcgcaaaagctcttcgggtgattaaaaagctgcgtgcgggcatcacttgggtaaacacatatcattttacatttaacgaagcgccttggggcggatataagcagagcggaattggtcgagggctgggcacgtttggattggaagaatttcaagaagtaaaacaaattaatattaatttacaagtagagccaatcggctggtttaaaaattaaaaagtagagaaggagcgatattaaaatgaatacagtgacgaaaaatcaagaggtaaacaaagcatatggtgaagtaaacgaatatatcaacaaagtgctgggacttattgaaaaaagcgaagtgtcagctgaagaagcacagtggattacgaaagaaacagtagacggatttcgtgagcatgtcaacccaggctttttagaatatcgcaaaacagtaacggtggatacgcagtttgcagctgtggaatggtcagatgaaggctcttgttttacggatgtaaacggtaaaaaatacattgattgtttgggcggatttggaatttataacgtggggcaccgccatcctaaagtagtcaaagctgttcaagatcagcttcagcgtcaagcgctccatagccaagacttattagatccacttcgtgcgatgcttgcgaaaattttagcagatattacaccgggggatttgaagtattcctttttcacaaatagcggaacagaaagtgtagaagccgctttaaaattagcgaaaatgtatagtgatcgaacaacgtttatttccacaacacgttcttttcacggaaaaagtctaggttctttatcaggtacggcaaaaggaatgttccgcaaaccatttctgccgttaattccaggtttccgtcacgtaccgtttggtgatattgacatgatgcgcaaaacatttgaaacgtgcgtgcttgtaggggaagatgtggcagctgttttattagaaccaattcaaggagaaggcggcattattcttcctcctgaaaattatttaaaagaagtgcgtgcactatgtgatgagtacgacgctatcttaatttttgatgaagttcaaacaggtatgggacgtaccggtgaaatgtttgcatcagaactatacgatgttgtacccgatattttatgtcttgctaaagcgtttggaggaggagttatgcctgctggggcagtcgtagcaaaagaaaaagtgttttcaagtttctttgataatccgtttatgcacacaacaacgtttggaggtaacccgcttgcctgcgcagccgctattgccaccattaacgtgttgattgaagaacagctgccaaaccgtgcaaaagagctgggagaatatttccttgctggtttaaagaaagcagctgaaaaacatggagataaagtacttgaaatcagagggcaaggtttaatgattggaattgagtttcaccaagatgaaattggctatgcactctctaaaggtatgtttgatgaagggattctagtagccggaacgcttgtaaattctaaaacaattcgtattgagccaccgttgactatttcagcggaagaagtagatcaggtcatttctacatttgaaaaagtattaaatgagctgaaccaccaataaatgtaacaaggagcaatgaatatgagtcggcaaacgtttcttattcccgtattgctttcaatgattttagtagtagaaatgcctagtgactaattgaaatcattgaaacggaggagtaaattatgaaatatccattgtccccagatgtcaaaccagaattttgtacaacgggctcatttatgaggctgccagcggaaagagaaaatgcaaaagtaggactagtagggatgccgtttgatacggcagcatcttttagagtaggtgcgcgctttgcacctcaggcaattcggcaagcttccatgacgctgtttccttatcacccggtacacgacgtatatccattcgatgatacaaatgctatcgatattggtgatgtgtccgttattccgcataatattcacagaagctatgaattaatggaagaagcggtaggcactcttatggatagaggaattgttccaattggaattggaggagatcattcgattaccttagcaagccttcgtgctgctgctaaaagatatggtccagtggctatgattcattttgattctcatacagacacgtgggatacgtattacgatgaaaagtattggcacggatctccttttatacgcgcatatgaagaagggctagtagatccaaagaaggtctttcaaatcggtatcagaggaacattaaatcatccgggagatgttcaagaaagcaaagacctcggttatcatgtagtaacggcaggagagcttgaacatcaaggattttcagtggttttagagcaaatgaagacagcgattggagatacgccgtgctttttaacgtttgatattgattttgttgatccttcttgtgcaccaggaacaggaacgcttgaagtaggcggattcagcagcagagaaacgctgaaaatgatccgttctctggcggaatttaactatgttggatttgacctggtggaagtgctgccttcttatgatccaactcagataacctcgttgcttgcagctacaatcattcatgattttgctagtttagttgcagtgaaaacgaaaagagagtcattggatgcgatgattgaataacggcttgtaagcagaaatccctcttattcagagggtatttctgcgttgatatagcaggagattaggaacatatagctatttaaaataaagcgctttcataatatgataaaagaaaaagatagtttgttagcaacccttaccaacttaaagaaataaatcatatatttgttatagtaaatgtaactactctttatataaaaatgaatgaaagtcattcatttttatataaagaaattaaatacaggcatttatggatttaattgtcagaatgttcttaataaatagaagggggaagataaatggaacatgaaacagtaacattaaaaaggtcgttgaaattatggcagattgtattaatggggatcggatatatgactccgatggtagtgtttgatacgtttgggattgcatctgatatgacgaatggacacgttcccacgtcttatatcatagcccttgtcgggatgcttctcacagcagtaagctacaaaaagatgattcaagtgtttccaaatgcagggtcagcttatacatatacgcaaaagacaatcaatccacatttaggattcttagttggctggtctgcactaatggattatctctttttaccgatggttaacgcacttatttttcaaatttatttatcatctatttttccttcggtaccatcgtggatttgggttgtcagcttcgtcattatcgttacgctgctaaatttacgaagcgttaatttcaccgccaatttcaatacgtttcttgttgtatttcaaatgacgattttagtattgtttgttgctgtttcaatcaaagccctgctaggaggaatgggggaaggtactcttttttctatgaagcctttctttaatcagaacatgacgtcatcagggctaatagcgggagccacacttatgtgtttttcctatttaggatttgatgcagtggctatgttatcagaagaaacgcctaatcctaaaaaaacgattccgcaagctatttttttagttgcgttaatcggaggagtcatgtttaccgtgacatcttattttattcaagcggtttttccaacgttagaaggattcaagcatccagacgctgcggctcctgaaattgctatgtatgtgagcggtacgctgtttcaaattgtctttttagctggaggaattgcaggaacattatcgtcaggcatgtcatcgcatgcaagcgtttcgcgtttattatacgtaatgggacgcgatcgaattttacctcagtcattttttggttatgttcatcctaagctgcgcactccctctcgaaatattgtattagtcggagttgtatcagcaactgccattttcttcagtctggcaacggctacgtcatttattaattttggagcactcattgcgttttcttttgttaatatttcggttattgcgcactatgctgttcatcaaaagcagcaccggtcggctaagggtttttggtcatacattattatgccactattaggagcggcagcgattggcgttttatggcttaacttggagcgcaattcatttttacttggtattggctgggcgattgctggtttagtttatttagtgtatgcaacgaaaggttttagaaggcagctgtcttccattgagtttaaggaaacagaagaaatgtcacctttgatgaaagtcggagaaaagtaaggatagaaactacctgtttaagcctatcttattaaggaagccacatttatggattacgtattttgaacgtgttactatgtaagaacgataagatagaaaaaggtaggtaaattatgattaaagcagttgtgtttgattttgatggattaattattgatacagaatctgtatggtacgaggtgtaccgcgaaatgttagaagacaggggagtagatctaccgattgcaacgtttgcttcttatgtaggaacggatgctacggcactttacgattatttgcttcagcagtttaacaatgagttcacaaaagaggaactagctcaagaatcgttaagacgtcatcaagaaaaaatgaaatcattagtagcccgagaaggtgtagcggagtacttggcagaagcaaaagaacttggattgaaaattggtttagcaagcagctcatatcgtgactgggtaacagcttttttaaaagagctagatttgctgcactattttgaagtcattcaaacgcgcgatgatgtagaaaaagtgaagccagatcccgctctttaccgaaatgcaattgaaaagctaggagtagatccctctgaagctttggcatttgaagattcttctaatggagcaaaggctgctatggcagcaggcttgcgctgtgtgattgtaccaaatccgttaactaaacatctgtcgttcgaaagatatcacttacacatcgaatcgatgaaagagaaaagtttaaaagaagtgattcagtatctttgtattgaagactaacgctaaaagcgccacatttttcaaaagaaaatgtggcgctttttttattgttttactgcttcttcagtcaaatcaaaaggattatctacagggttatagacgccgtcgtagtgtttttttaactgttgcaataataagtcaataacctttaaagaaatcctaattcagcattagtaatagcttcatttatgtttcattataaagagagaagtttcgttgacaccctggaagaatatgttttaagattacttccaaacagatttaattcttagttaatttatgtatttaattagttttggaggtttctatggggaaacatatttatttaaatgcgtttgatatgaattgtgttgtacatcagacacctggtttgtggacgtacccaagtgatcaggcggctgaatataaaacgttagattactgggtgaagttagctaagctattggaaaaaggaaagtttgacggtttgtttttagccgatgtattaggtatttatgacgtttataggaaaagtaatgaaggagctcttaaacaagctgctcagcttccggtgaatgaaccaactgcgcttatttccgctatggcatatgcaacaaagcatttagggtttggggtaacggtgtctactacttatgagaaaccttatgcgtttgcgcgaaaattttcgacgttggatcatttaacaaatggacgcattgcatggaatgttgtgacttcatatcttgaaagcgggtcaattaatctaggattagaagaacattttacgcatgaaacccgctatgacattgccgatgaatttttagaagtttgctataaattatgggaaggaagttgggaggaaggagctgttgtaaaagataaagaaaaagggatctttacacttccagaccgggttcatccgattaatcataaagggaagtggtttagtgttccaggtgtacatttatcagaaccttctccgcagcgaactccagttttatttcaagcaggagcttctgccccaggaagagtatttgccgccaaacatgctgagtgtatctttacaagttttcctactaaaaaagtagccgcagattatgtaaagaaaatgcgcgctcaaatcgctgcagaaggcagagacccacagagcgtattaatttttaatttatttacaccaattgttggacgaacagaaaaagaggctgaagagaagcttgctcgttttgaaagctatgtcaatttcgaaggagcagccacgctgtttagcggctggacaggaattgatgtttctgtctatgaatcagaacagcctattgaatttattgcgacgaattcagttcgttccgctttagagaaatttacaataagtgatcccgatagaaagtggacggtagaagaggtagtgaaatttgtcagtatcggaggaatgggaccggttactgtgggtagtccggaacaagtagctgattttatggaagagtggatagacgatacgggcatggatggatttaatatggcttatgtgaccacgccgggaacgtttgctgattttattgatttagtgattcctgttttgcaggaaagagatttattcaaaacagattacagtgaaggaacttatagagaaaagttatttaaaaaatcccatttcttgcctgatgaacattatggcgctcagtatcgaaagacgagccaaaaggagagtttaacatgactgcgactactgtaaaggaagaaatttatcttgatcaagcaaaaaagctgtccgtttcttttgcaaaggatgcagcacaaagagataaagaaggcggaacacctaaacagcaaaaagatgctattcgccaaagcgggctgttaaatttattaattcctcaaaaatatggcggagaaggcggggaatggtcaacggctttagctattgttcgagagttggcgaaaggcgatgcagcattgggtcacttatatggctatcactccttgtttgtctcagatgttcgaatcaaaggcacagaagaacagcaggcctatttttatcctttatctgttcagcagcaagctttttggggaaatgcctctaatcctttagtagaaagcctaaaaggtgacaagcaatcacaaggttatctattaaatggaacgaaagcgttcggttctggttcaccggattctcagtacttatggttatcatttaatgacagagaaacggggcaatatttaaacggagtcgtgcctactgacagaacaggtattaccgtcaaagatgattggaatgcgatgggacaaagacagacgggaagtggaaatgtagattttaaaaatgtacgaatagaagaacatgaagtgattcaatattttgttgaaaaccctactcctttttcaactattggagcctcgctgtcgcaaattattttaacgaatgtctttataggaagcgcttttggagcaattgaagaagcacaaaactatacggcttctaaaacaaggccttggttaacatcaggagtagaaaaagcttcggatgatccaggtatactgcgaaaatacggtgaactctggattcaagcgaaagcagccagtgcacttgcagatgaagcagctctcgtattggatgaagcgtgggaaaaaggcagaaaattaacggaagaagaacgtggaaacctagcagttcacgtagcggctgccaatgtttttgctggtaatgctgcactggatataacaagtaagatatttgaagttatgggagcgcgttcggttcatgctgaatacggatacgatcgattctggcgtaatgtaagaactcatactcttcataatccagctgaatacaagcttcgaacggttgggaactgggtgttaaatcagcagtaccctacacctaatccgtatgcttgatttaaaaatagtaaaaaatgaagctatcagacaactgaggctccttattgcagtttatttgtaataacggagtttttttatgtagctttaaaaaggggcgagtacaagtggagttattttggtttattccaacgtatggagatggacgttatttaggaagccatgaaggagccagggctgcaagctattcttattgcaaacaagttgcacaagctgcggatgagctaggctatagcggggtcttgcttccgacgggaaaatcatgtgaagacgcgtggattgctgcatctactttagtgccagtcactgaaaatctgaagtttttagtagcagtacgcccgggtttaatgtcgcctacacaagccgcaagaatggctgcaacatttgaccgcttttcgaaaggaaggcttctcattaatgtcgtagcaggaggagatcccgttgagctagaaggagacggagtgtttttaaaccatcacgatcgctatgagctgacagatgaatttttaacggtatggagaagggtattaaatgaatccgatgttcacttcgacggagactacttgagtgtgaaaggtggcgacatactttatccgccagtccaaaaaccgtatcctcccctttattttggaggttcttctcctgtagcgatggacgttgcctcaaggcatatagacgtctatttaacttggggagagcctcctgcacaagtcaaagagaaaattgaacgcatgaaagaaaaagcaaagcagacaggaagagaaattcgatttggcatcaggcttcatgtcattgttcgtgaaactgaagaagaagcctggaaagctgcagatgaactgattaaacatgtagatgaagaagctgttaaatcagcccaaaaagtattttctcgaatggattcagaaggtcaaaaacgtatgagcgccttgcatcaaggtgaccgttcaaacttagaggtaagccctaatctatgggctggtgtagggttagttcgaggaggagcagggactgctttagtaggagatcctgatacggtggcacaacgaatcaaagaatatgcagagttaggtatcgaaacatttattttatctggatacccccatttagaagaagcatatcgaacagcagagcttttgtttccaaggcttccagttaagcgtaagcacgatgagaacgagcgcacatttatcagtccatttggtgaagtgaaagcgaatgataaaacacccgctaaaaggtgagaaaggagggtaatcatgaacaacacccaaacgattgcagcgtctcaagagaagatccttgaattggctaaccagttggctaaagagttttccaaaaccgctgcaaaaagagatagagaaggtggaacgcctctacatgagcgtaatttgcttagaaaaagcggtcttttagctctcccgattcctaaagaatacgggggttatggagccggctggccgattgtttttaaagtcgtgaatatcattgcgaaagcagatagttcacttgcgcacttgttggggtatcattatttgacggtttgttcgacgtttctgtttggaagtactgagcagtacaaaactttttacaaagaaacagcagctcagcagctattttggggcaatgcctttaaccctagagattcaggactaaaagcagttcgagaaaatggaagattaatgctcagtggaagcaagagtttttgttccggggcaaccgattcagaccgtttgttagtatcggctcaagaagaaggaagcggtgaggtattgctatgtgtacttcctacttatagagccggaatcgttactgaagataattgggatggatttggccagcgccaaacggatagcggaagtgtaaagtttgaagacgttatcgtttatgaagaagaaatattgcgtaaagcagctgaagagcaaaaggtttttcctacggtacgaacgcatttggctcagcttatgctcactcacttattgtacggtattgctcaaggcgctttggaagaatcaaaagtttacgtgaaggctcatacaaagccgtggataagttcagacgttgaagcagcagagcaagatccgtacattattcagcaatacggtgaaatgagtttaaaccttcatgcttgttcagcacttatagaaaaagctgttgcagaatttgatcatgcatggaaaaaagaagatgcgctaacgaaacagcagcggggcgagtccggagttgcgattgcgttggccaaaacatttactgtcaaaatggtcttacatattacctctactatatttgatgggatgggagcgagagccacgtctgatcagtataaatttgatcgatactggcgcaacgcccggacgattagcttacacgatcctattgcttataagttgcgtgacatagggaaatggtgtcttagcagtgaactgccgcctattacaccatattcatagaaagtctgctaaaaagaggctgggagaaaaatagtttagttgaaggaagatccgaacgatgaatcgttcggatttttttatggtgatggtgaacgtaggtttcatatattgagttgcttctagcggtgtctcaagcagttcagctcatatatcccatttgttcgtctttagattggaatgatgtagctatatctcaatctcttttttgtagaatagatataatttttttaattaaaaaataacgaatcagcttgtttaaatagataaaactgatataatgataacgattatcagtttcaagagtcgattatctacataaagatacgagcaggaggaatgacatttgaataagaaaaaaataggactgctggcttttattacaatgctggcaatcggaatgcttatcggctgcagcagcacgaataagggaaattcagctgatgaaaaaagtgaaaaaacaagagtggtcaagcatgagcttggagagacaaaggtaaaagagaatccaaagcgagtagtcgtattagagttaggctttattgatgcattgttagatgctggtatcaaacctgtaggagtagctgatgatgataaagcagaacagcttattgataaagatgtactaaaagaaatcaaaggatacaaatcagttggcacgcgagcgcagccaagcttggaatcgattaaactgctgaagcccgatttgattatcgccgattcagaacgtcataaaaatgtatacaaagaattatcgaaaattgcgccaacgattgagttaaaaaacttaaatgctaattacgatgatttactaaatacagagttaaaagtaggagaagcggttggcaagaaagcaaaagttgaaaaagtggtagaagagcataagcaaaaaatgaaggatttaaaagcaaaagcaccaaaaaatccgggcaatgtacttgttatcgctgatgcaaatggtaatattaatgctagaacttcaaatttctttacaacgggtgttcttgaacaattaggcttcaaaaatgcattaacagatcctacaaaagagtacagtgtaaaaatgacaatggaacagcttgtaaaagcagatccggacaaactcattgttatgcgaaatgaaaaaggtcatacgcctttagcaaaacagccattatggaaagagctaaaagcggttaaaaataatcaagtgtatgaagttgatgtatttaaatggtctcttcgccgaagtgtacaaggtgcaaatggtattgcagatgaagcagaaaagttattatttgaaggcaaataataacgaagaaaagaacaatccagcgggattgttcttttctttttaatgaactttcaaatggaaggaggcgcattctactatgaaagctgttcacggcttatccaaaagaaacaaatctccgcttcgtataatagctacttttcttgcggttattattcttttactgatttcaatgtttttatctatttccatcggttctatacatatttcttttggaacgattaagcaagctatactaaattttgacggatcaaaagaacagtctattattcaaactgtccgtctgcctcgcttattggtaacggcatttgttggcgctaatttggctgtcgctggagctttgatgcaagcattaactagaaatccgttagcttctcctggaatttttggtattaatgccggcgcatcagcggcaatggtatttttaacggttttagtgcctagtgtaagcatgattggcggggtatttggtgcatttttaggaggcgcatttgctgctgttattgtttatgtcatgagttcgttgattaaaggaggcgacagtgatgtaaagcttgctttaacaggtgttgctatacaaggtatgcttatgtctctcacgcaaacgctgctgatttttaatgaaagcaaaacagaaggcgttatgttctggctcaccggttcagttattgggcgagattggggacatgttcatgtattggttccttttagcatcgcgggcctgcttattgcgtttggtctgggaagagcgtcttctttattgtctttaggagatgacgtagctagaggactcgggcagcgagtctttgccattagagcgttcactgcagttgttgtgattgtattagcaggtgtttcggtggcaattgcgggtcccattggctttgtagggcttgttgttcctcatatggtacgctatttaataggtgtagattaccggttcgttttgccaatgagcgcgctgcttggtgcatctttattgctgctagcagacgtattatcacgatttattacatacccgtatgagactcctgtaggtgcagtaacagcattgctcggaacgccgtactttatttacttagcgagacgcaaaaaaacagaaaggaaggcatgagttatatgcagactgtcaataaaacaaaaaagcagccatctcgattcaagtctgtcggcctgtttatcattctttctgtcttaattatagcgctgagtgtgataagccttagcttaggagacattaacatacctcctctagacattattacgtcttttattggtattggcgatcctgacttgacgtccattttagtagaatttcgtctgcctcgtattttgctggctattttaacaggagtcggcctagctgtgtccggagtcgtcgtacagtccattatgagaaatccgctcgctagtccagatacattaggtctatcaagcggatcaggattagcagctgttgcagtcactattttactgcctttagcaaccccatccgttttatccgtcgctgcgtttgcaggaggctcgcttgtctttgtaatcgtctatttgcttgcttataaaaaaggagtagaacctattcgatttgcattaataggtgtagcagtcagcgctttttgttcatccggtattcatttgttaatttcaaaagcaaatccaaacgtaaatgcggcactgatttggctgagcggcagcttatggggaagaacatgggatcaattaattggtttacttccctgggtcgttatattagtaccgctgatttggctgttagctgcccggttagatttaattcatctaggtgatgaagtggctcgaggactaggggctagagtagagttaattcgtctagtattgctggcaagcgcagtggcaatgacggctgcggttgtatcggtggttggcacaattggctttgtagggcttattattcctcatgtggccaagcggttagtgggaccgagacacaaaaaattgattcctacagccgctttgcttggcgctttgtttgtactagcagcagatttaattgggagaggaattgctcctccgattgaaattccggctgggctaatcatcggcattatcggcgctccgtattttctttatttattgtggagagaatctaaaaaataagctcgcgctaaagcgcgagcttatttttattccaaatgaattttttgggaatggaatatgcggaggctcttctagccatccttgttcaatacttattcttgatacttctttggcgtattccaaaatttcattcgtgaagtttgtatagtttaaagcgagatctaaacgcgggctcgttgacatcgccagcccgtatccacgtacattttcagtaatcatcgcggccaggtgaaacatcatgagtttttctgaaaatggaggaatggaagacttttctactccgtaatcccacttcattgtgaccggtatgttttctaccattagcggttgtgacagggattcaatgtgctgctgtacctgctctctaccttttaacaaaaaagcttgaatttcctgagaaggagctgtttgagcaaaccctaaaattaaatcctttgcaattaagttcgtctgtatgcttgacacgatatgagaaatttcaatgaccgttaacggccgcttttcatcaaaatagcttcctaagaagagttctttatcgtttgaaatatgcttcaaataaagcaaataaaaagaatccgaaaataattttggagcttcaacattaaggtcttcttcgccgaaacctagcgggattggcatattttcttttaaaaagatagcagtgagcgcatcactgttttttgttgtgatgcagtgtaccttgaatcgctttttgaatatctaaatcgtctacatgacacagaaaatggttaatcatacaagaaattgctttatcgttcatatattgcttccaaataacagccatctcggcggctgatagtggagaaaatgattgattgttcataataaactcctcatatatagataattaacaagtttctaaaagattatcaactagtataagtcaaaggaagtaagataaacactatagaaagtaaaaaaagtatcaacattttactataagagtaaccgtcatacataatttaaaggttcttttaggaaaagaagagttcaaccgcttctttcttgcaaagcagaaataaaaccgaaataataaatgaagaaagttaggcaagaaaggagtttcattatatgccagaaggtccagaaattagacgagcagccgatgaagtggaaaaagcgattattagtcttcccgttagcgagatatggtttgcttttccatctttacagcattacgaagaagtattaacgggtgctcgtattaaaagggtagatacaaaagggaaggctatgcttattcgttttgacaatggctataccatttattcacataatcagctttatggaaaatggtatgtacgttcatcttacaattatccatctacaaccagacagttgcgtcttgctattcataatgaaaagaaatcagcgttgctctatagcgcttctgatattgaagtattgcgtgatgaagaagtttctgctcatccttttgtatcaagagtaggtccggatattttaagtgaagaagtaacggcaaatgagcttttagatcgcttttactctaagcgattttaccgcagaaaatgggcgtcgctgctgctagaccaaagctttatagcggggattggaaattatttgcgcagtgaaatcctatttgtagcgggaattaatcctgcatctcgtccggtagactgcacggaagaacagcttaaaaaggcagctgaagcaaccatttctcttgtcaaacagtcctatgaaacgggtggcattacaaatgatgtaaagcttgctgaaacgttaaaaaagaaaggccaaaagcgctctgaataccgccactgggtttttaaccgtgaaggagaagcttgccgaattgacggcacgcatatcttaaaagtgcaagctgcttctagaaggctttattactgtcctacttgtcaaaaatagcaggatatatttattctgctatttttttgatgcgggaatgaatgactgttcattttttgtgatatagttaaaaagtaaagtcttaatcttaaggggagggataagatggaatgtaaaacaggagatacatttacgtggcaaagaacgtttcaagaggaagaaatcatgcagtttgcagagatgactggagaccggggcaaacatcatatagaacgtgacgaaaaagggcggctaatggtgcatggacttatgactgctagcattggaacaaaaataggaggagacttaaactatattgcaagagaaatggtgagtgaatttcttcgtccagtttttgcaggagatacagttacctgtgaatgcatattaactgaagtagaaaaagcagatggttttcaaaaagtgaaaattaaatcagtatatcgaaatcaacaaggtaaagaagtactgatagggacaagtaatggaattattagagattaaaatgaaaacgttaacaaaaataagttatgaaggttgttagaaaagtcacggattcgtgacttttttattgtgcaagttccttcttttattgtttaccatttaaatgtaaatatggtaatttaataaagttgggttttataaatggtaaaaatgtgtatttactaagtacatagattcttatttttggaaaaatatttaaaaaggagttcttacatgaaaaaaataatgaataccagcttagcactatcattcgctctattgctttcggcatgtgggatgccgtcttcagaggaattaacgggtgacgtgaaagaagcacaagaaaaggtgaaaaatgttcaagtgaaggtcactggaaaagaagaaggatcctctgattaccaagtaaacggagtacaagagtttgattttaaaagtaaagcaggttacattaacacaaaaatgaacggcgaagaattgaagatgtatcatgacggtgatgaaacgttagctgtggctggagaagaaagcacaaaagtacagggggaagaaaaaaagtacgttacggctttaatcaataacgctagggagcttcaacaaaatccaatacgctactatcaaaaatatgataaaaatcttccagatgaatttgacgtcactgaaaaagacaaagagtatgtattaacatttaacggagagaaagacaaaaagcaaaaaattgtagcaggtgatgctaaagcttattataaaataacaaatcaaggcagcgataccgctgtagaccttgaccaagttaaaggaaaagatttttcgcttgttgtgacaattgataaagaaacgaagcaaataaagaaagtagtaaaaaatcagtcgtattcagttaacgtagacggaaaaacagaaaactcaaagtctaagcaaacgtatacgtatacatacaatcaattagacaatgtaacaaaaccaaaagtggaagcaaaagccgctgctgcttctacagatagcagcaccgaaacaccaaataaagaaaagcaagctgcttatgccaaggaagcaggacaatacgtagatgctttaattcaagcaactgtttatcaaaatacagatcaatttgttgctaaacatccgaatcagcaagataagaaacaggtgaaagaaaaaggggagttccaaaagagttcgtttgtagagttttttgaaacgaattttaaaggtgccttatcatcattgagctcaaatataaccgacgagcagttaaacgaagtaagcagcgcgtttctaaaagctctttcatctacaaaatataccattaaagatgcagcgtatagtgatgaagatgatgcgtacgtcgtacaagtcgaaattcaaggatttaacgatgcaagtgtattagcagaagtcatgacaccacttgcagaaaaatatcaggcgggtgagctgagtaacgagcagttagtaaacgaacttattgacggagtagcaaaacgttatcgtgagccagttgaattacttccggcaaaaacagtccctgtacacgtcgtaagaaatggtgaacaagattacgaagttttaatgcaagatgagtatctgttaacatttgctcaacaatcataaatagacataaaaaagatttcggctatatgcctgaagtctttttttatgttaatttaaaatataattttaaaaaataaaataattattgaaattatattttaaacaaattataataaccataacttcactacatgatgaaaaagaagccgaaaagatgaatgaacagcttacgttattaacaacagagtcccaaaacgaacagacaatgaagatcgatacagctagtacaaaagaaattttaaacataatgaatacagaagatcaaaaagtggcgctggctgtacaaaaagtacttccagacgtagaggtggcagttgaatttgtaagtgaatcgtttcaaaagaaaggccggcttatttatgtaggcgcaggaacaagcggacgactgggagtattggatgctgttgaatgcccgcctactttcattaccaatcctgatcaggtacagggattgatggctggaggagaaaaagcatttgttaaagcagttgaaggtgctgaagataaagaagaattgggagcagcagatttacaaaaaattcatttgaatgaacgagacacagtcattggaattgctgcaagcggacgcactccttatgtgattggtgcattaagatatgcaaaatctgtaaaagctaaaacggtggcgctgtcttgcaatggtaattctcttattggaaaagaagcggaccatagtattgaggtggtagtagggccggaagtgctaacaggttccacaaggttaaaagcagcaagcgctcataaaatgattctcaacatgatttctacagcggctatgatcaaagtaggaaaagcgtatgaaaacttaatgatagatgttcatgtgagtaatgaaaagcttaaagaacgagcaataggtattatttgtaaaattacaggtgtttcttatgagcaagcaagtcaaacgcttgaagaagcaaataatgaggtaaaaacagcagtggttatgatcaaaacaaatgaaaattatgacaccgcgaagatgttactgaataatgcggacggttatgtgagaaaagcgattgaacattacgtatataaaggagagaaacgatgtcaacaggcggattaacaatgattaaaaacacggtggctaagcttcctgattcggagaggaaaattgctgaatatattttaaacaacccgcatactgtggtaaacagtacggctggagaattaggtagactagcgaatgcgagcagtgctgctgttattcgtttgtgcaaatctatcggggttagcgggtttcaagaattaaaggtaagagtagccggtgatttagccagagatacggagcaaggataccgcgatattgaaacaaatgaaacgattcaatctattgtcaaaaaaacggcaagcaacagcattcaaagtctaagtgatacggccgagcttgtgaattataaagaagcagagcgggctgttttggcgctgattgaagccaaaaacattcatttttttggaatcggtgcttcacatattattgctatagatgcgcagcaaaaatttcttcgaattaataaaaatgccacggcttttgcagatagccatttagcagctacactcatcgcaaatgcaagtaaagacgatgtagttgtgggtatttctttttcaggggagactcctgaagtaagcaacgtcttatctttagctaaaaaccgtggagtaaagacgattagcttaaccaagtacggacagtccaccgtttcgtctttagctgatatttgtttgtatacgtcttattctcaagaagcgccgtttcgaagcgcagctacatcgtctcgtttagcccagctttacgtgattgatgtgttatttttaagtattgcagcgcagcagtatgaccagacgattgagtatattgacaaaacaagagatgccattcagtttttgaaaggtaagaaataaaaaagaaagcgattacaaaaaggggattttgtggtctgtttcctcagtaccgtatccatctaagaggaaaatacaaagggggattaacatgtctttagataatcatcaattagcaaaggctgttttggagatgcttgggggagcatccaatattgaagcgtatacgcattgtatgacgcggctgcgtgtgacggtaaaagatgattcaattgtaaaaaagacggatatacgaaaacttgaaggcgtgctcggattagtggaagaagaaacgcttcaaattattattggtcctggaaaagtaaacaaagtaacagaggaattcggaaagttaattgatgaatccggcggtattaatttagaaaatcgtgcggctcagcggaaatcggagctgaaagaaaaaaatgcaactccgtttaagcttttgcttcgccgaattgcaagtatttttattccgttaatacctgctcttgtagcatctggacttatcaccggagtgacaaaagcagcagttcaagcgaagtggcttcctgcagattcacagattgctattctattaacggttatcggaagcggcttatttgcttatcttggtattttagtaggtattaatgccgcaaaagaatttggtggttcaccggctctagggggcttagcgggtattttagtcattaatcctgccgtagctgatattaaacttttcggtgaagcacttttgccgggacggggtggcttaataggagtcttgcttgcagcaatctttatggccatgttagaaaaacgagtacgcaaatttgtccctcagtcactggatattattattacaccaaccgttacggtattaattacaggcattattacgtatgtagtattcatgccaatcggcggcttgatttcagacggaatcacaaaaggtcttttaggagttttagagattggaggagttgtagcaggctttgtgttaggagcaacattcttgccgctcgtcattacaggactgcatcaaggtcttactcctgttcatttagagcttatcaattcaattggagatgatccgcttcttcctatcctagcaatgggcggagccggtcaggtcggtgcagcttttgctatttatatcaaaacaaagaaaaaacgtttaaagcgagcaattggaggcgcacttccttcaggactgctcggaatcggagagccgcttatttttggagtcacacttcctttagggcggccattcttaaccgcttgtcttggagctggaatcggcggagcgtttcaggcgcacttccatattgcaactgtagcagtgggagtatcaggtttaccgcttacgtttttagttcatgcgcatcaaattcttctttatttacttggattagttattgcttacgcggcaggctttatttgtacctatttctttggatttaacgatgaaatggcgagggagtttgaatgattggcatttcgttttatttaaatgatagtgatgcccccaaaaaattaatagaagcgagtgagtgcggcgtcacacgtgcattcacttcgcttcacattccagaagaaaaaggagatttggctgaacgggcaaaagaattgcttcatgtggctagagattgtggaataagcgtgtatgcagacgtatctaagcatacgccagttcatttaggtattgaaagccttatgtcgctatcttcacttggcgtatctggtattagactagacgatggctttagcgcagaagaaactctttcgcttgcgaatgaattttatattgctgttaatgcaagtacgttatccaaacaagaaattgaagcactcttatctgcaggtcttcatcatcatcagctgcttgcatggcataatttttatccgcggcctgaaacagggcttgaagaaacgttttttcaacagcagacagatttatttaatgaacttcgtattccagtctgcgcttatattcctggagaagacgaaaaaagaggccctgtttatcaaggtcttcctactagagaaaaagaccgtaatagatgtccttttacttctgcagtagatttatacggatgcggagtagcagaggtttatattggagatccatgcgccggttcaagtttattaaagcgtttggttcaatatcaagaaagccgcattattccgctgcgcattcgttcacctcatatagagggaacgtacagcgtgcgtccggatgtatcaagagacgttctgcgtttagttgatactcgatctgtaaaaccagtgccgccatttcatacagtagaacgcagaatgggagcaattacaatggacaatgatggctacggacgttacagaggagaggttcaaatagctaaaacgaatttgcctgcaaatgctaatgtgaatgtgattgggtatgtgatagaagaagatcatgagctgctttcgttagtgagaccggggcaaaaacttgcgcttcttcctgtctgaatggaaaaacgatgtatttttaaagaagccgatagttaactagtaagcttataaaagtaaagagcacacactgcttgaaaaggtgtgtgctttttgttttcctaaaaaggaaactattttcattgctgaataatgaacctttctattgaataaaacgctttactatgataaaactattacaggtaaacatatgataatcgtttaattttatagagatacaacgccactaggggtgctttctaagctgagagagacgagaagtcttaacccttataacctgaactaggtaatactagcgtaggaaagaggtattgtaatggatgttttgtatggtatttccttacgaactcgttataataattttttgtatataaacaaaaacacttctttcctgcgaaagaagtgtttttttatgcgtaaaggaaggtgtcatacatggaagaaacaattgatttgcttgtcaaacaggtagaggagcgcaaaggggagctagtccagttattaaaaacgcttgtttcatataaaacgccggcgcctcctgcacggaattctcatgaagcgcagcgctacgtagcggatttccttaaaaactgcggtttttccatcgatatgtgggatttatattgcaacgatcctattgtagtgggcacgttaaaagggaaaaaatcagctgactatcaaagcttaattattaacgggcatatggatgtagctgaggtacaagaaaatgaaaagtgggagacaaatccgtttgaagctgtggtaaaagacaacatgataatcggacgcggagttgctgatatgaaaggcggcttggcaggagcattatttgcagttcagcttctaacagaagcaggaatcgaactgccgggagacttgatttttgaatccgttgtaggagaagaagtgggagaggcaggtacgctgcaatgctgtcagaaaggatatacagctgactttgcgcttgttgccgatacgagtgatttacatattcaaggtcaaggcggagtgatcacgggatggattacgataaaaagcagtaaaacctatcatgacggtacacgccgaagtatgattcatgctggaggagggctgttagctgcgagtgctattgaaaagatggcaaaagtgatcggagggctgcaagaattggagcgccactgggctgttacaaaaagctatccaggatttttgccgggaacaaatacgattaatccagcagtaatcgaagggggaaggcatgctgcgtttattgcagatgaatgcaggctgtggatcaccgttcactattatcccaatgaatcatacgaccaagtatcaaaagaagtggaagaatacattttagctattgcaaaagcagatccatggttaaaagataacctgccaacctttgaatggggaggcacatcaatgattgaagacagaggagaaatcttcccgtcattagaaattgatgaaaatcatgctggagtacagctgcttgcaaatactcatgaacaaattgaagggaaaaagcctccaatcgatgtgtcaactagcgtaacagatggcggttggctagctgatgcggggattccggcggctatttacggtccggggaatttagcaaatgcacatgctgtgaatgaacaattagatatgaatcagcttattcaatatacaaaagtgatggtgcagttcatttatacgtggctgcatacgcataaggagtgatcatcatgaaatttagtgagcgattatacgaaaagctgcagcctatttggcgtcaaaatcataatcatccctttgtacagggaatgggagacggaacgcttgaaaaggagaagtttcgcttttacatgattcaagattacctttacctaattgattatgccaaattatttgcgattggagccatgaaagctaccgatcttcaaacgatgggggaatttgctgcacttttggattctacattaaacgaagaaatgagcctgcaccgtgagtatgccaagaaaattgaaatcagcgaaaaagaattagaaaaagcgcagccatctcctacaacgcttgcatacacacactatatgctgcacgttggtcaaagcggaacattagctgaattagtggcggctcttttgccttgtatgtggagctactgggaaataggaaaagaactcagtgaaaagcctggagctaacaatgagttttatcgtgagtggattgaaatgtacagctcagaagaatttggagaactagcgacatggtgtattaatttattcgactcacttactgaagacaaatcagaagcggaattagaaaagctcgaagaaattttcttaaatacaacgcgttttgaatatatgttctgggatatggcttataacgaagcgatgtggccaattcatgaataagtctgtgttatcttttcaaaacgtcagttttacgtacaaaaacggtgatcaaccgattttaacatcattaaacttagatgtgaaagaaggcgagtttgtcagtatcgttggagcgagcggttctgggaaaagtacgttgtttcgtctcattacaggtcttgaacagcagagtgaaggcgatatcgtgattaacggacagtcttatgaaaaacggcttggaaaagtaggctacatgccgcagcaagatttgcttcttccgtggcgcacgattttagacaatgcagcgctgccgcttgagcttcacaatgtgtcaaaagcaagtgctcatagacaagtatctcagctgctcgaagagtttggtttaaaagggtatgaaaaccgttttccaagtgatttatctggagggatgaagcagcgtgtttcttttctgcgaacggtattaagcggttctaacgtgctgcttttagatgagccttttagtgcgcttgatgccattacgcgtttgtcgatgcaagaatggctgcttgaacaatggcaaaagcgtaagcacaccatcttatttatcactcatgacgtaaacgaagcgctttttttatcagatcgtatttttatcttttcagacaagccggtaagtcatcttgaagagattcaagtgccgcttagcagacctcgaacgcaaaaagatttgaatcaacagcgtgtgcttgacgtgaaagattatttaattgaacagcttagatcgaaggtgaacacatgaaaaagtacggagcttcagtgatattagtagtcattttactggctgcttgggaaattggagcacgcattgtaaactatccgtttattttaccaacgcccaccggtattttaacgaagctttgggatttgcgaatggatttattgtttaagcatttaccagctacgttatctattgtcgtaattggactggttatatccgttgtgctaggggttctgctggccgtgtggatgaattggagcccgcttattgagcgtgctttctatccgcttattattgcgtcacaaatgatcccgaccattgccattgctcctgtatttgttctctggtttggctactccatttggagcaaagtgattgtgaccgtattaattacatttttccccattaccgttagcacgtttgacgggcttcgttccacaaacaaagagttaaaagaactcatgttaacgatgggagcaacaaaaaaagatattttctttaagttgaacattccttctgcactgcctcatttttattcagggctcaaagtagcggttacctttagtataataggtgctgccattggcgaatggttaggtgcacaagcaggcttaggatatttcagtcgtcgcatgatgacacagtttgatgcagctggtgtatttgcaccaattgtaattttatccgcgcttggtattttattctttattattgtagcaggttttgaaaaacgttcattaaagtggaggaaaacagaatgaaaaaatggtttgtaattggcttaagcctgatgcttgttttgatgctcgctgcttgtggtcagaacaaggaaaataaagctggtgacagtaaaaaattaaaagacgttacaattatgcttgattggtatccaaatgcagtgcacagcttcatttacgctgcacaagaaaaaggatatttcaaaaaagaagggctgaatgtaaaagtacagtttcctgctaatccaacagactcgcttaatttagcagctgcggggaaagttacgctcggcctttattatcagcctgatgtagcaatggcacgagcaaacgaagatgtgccggtaaagtcggtaggagcgattgtaagatctccgctaaaccgagttgtggcgctgaaagatagcggtattaagcgtcctaaagatttagaaggaaaagtagtaggctacagcggaacgccattaagtgaatctgttctaaagaaaatggtgaaaagtgatggaggagatccgaataaagtaaaactagtagacgtaggatttgagttaaattcatcgctgattagtaaaaaagtagatgctgtaataggggcatatattaatcacgaagtaccattgcttcacaaaaaaggatacaaaacggttgacattgatccttcggattacggcgtaccatcttactatgagctagtggcagttactggggatcaaacgtgggcaaaagattctgatacgattaaagcgttttggcgtgctgcgacaaaaggatatgagtacacagagaagcatccaaaagaatcacttcaaattctattagataaccaagataaatcaaacttccctcttgaaaaagacgtggaaacaaaaagtttaaatattttacttccgaaaatgaagtctgaacacggatttggcagtcaaacgaaagaatcatggcagtcaaatgtggactggttaaaagagtcaggattaattaagaaaaagccaaatgtagatgaaatgtttgagaatatcggagaatccaagtaaataatttaagacgaatttaaaaaaaccttcttatactgaacgtaactttctgaaagagaaagtgaaaaggtaaaggaggtttttttatggcttttacgatggtagataaggaaacatgtattgcttgcggagcatgtggagggagcgcaccagatctttatgattatgattcagaaggtcttgcttatgcagtgctagataacaatgaaggaacaaaagaggttcctgaacatcagcaagatgagatgatggaagcgtatgaaggatgcccaacagaatccattaaagtcgcagggcagccgttttatagagatgcaacaaaattcgaatagggtttttgaagaaagttaacgatagagtacatttagttatgcgataaataaatatttggtgaaatagaaagtttcaaaacaaaaaaggtcttgcctagagcaagacctttttttattctaaatttgcatgctttccgtacattgtatgggtatcaagttctttcttctccatgaagcgaagaatcagcgcatcgtagaagagaagaagcgtttgttcaaacagtgacgccataggctgtactgtttgataactgttttgttcttgatccttaggagcaccgggcagcttcacgataaaatcagccagcttgccaagcgtggaatcgggagaaattgtgactactccaacttttcctccaagttcttttgctttttgagcgataggaatcaagctcttcgtctccccagaacctgatccgatgattaataaatcatcctgcgtgaaagtggacgtcacggtttctccaataacatacgcatcaatgcccatatgcatcatacgcatagcaaatgacttgcccataagacctgaacggcctgctccagtgacaaacacttttttagatgagatgatgccatttacaagctgttcagcttcatcgtcagcgattagagccgttgtttgtaaaagctcattcataaccgtttttaaatgttcgctcgtctgcatagaaagctccttaatttgtaataagctctttcatttgagaagcaactgattttttatcgtcttggctcgtgatgcctccgccaacgataacaagatcaggctgtgcttttactacttcaggtaaagactctaatttaatgccgccagcaacagctgtttttgcattttttacaacgcttttgattgttactaaatcttcaaaagagttttggccaactgcttgaaggtcgtatcctgtgtgtacacagatatagtcaacgccaaattcgtctagctcttttgcgcgtcctttaatatcttttaccccaatcatatcgactagaatttttttaccttgttttttcgcttcttcaactgcacctttaattgacatatcttcagccacacctaagatggtaatgatgtctgctccggcttgagaagcttgctgtacttcatagccagctgcatccataatttttaggtcagctaatacttttaaattaggaaatgcttctttaatttctttaacggcgcgaagcccttcattgattacaacaggtgtaccgatttccacgatatcaatatgttcttcaacttcttttactacctcttttgcttgagaaatattaacaagatctaatgctaattgtaattccattctactccactccttatagaaatctatagataccttttgtgcttttttacataaaaagcagctggtgtagttattgtacccgcagtttgaggttcttaaaagtacgcacttttcccacaaatagtgtggggaatgatagtatacagaagtatactaatggacatatcagtcttgtaaccgcttaattttcattgaaaatgcggatgatattgattaatatcatccgcataaaaaaataaaaactatggaatagaaggattagtttccattatttaattaacgtttctgccttttgttcttgattgatcagcactgtatcacggtaatttttaccccaatcgtacatggctgtcaaaataggcattaaactttctccttcttttgtaagtgagtattcgactttaggtggtacgacaggataaactttacggttaacaattagatcttcttccagttcccgcagctggttaaccagcatgcgtggcgtaatatcaggaataagcgattttagttccccgaaccgttttgttccttcacgtcctaagtgccatagtatcagcatcttccattttccgccgataatagcaagcgttaattctttttcacagttaaattccttattaagctggctcaattgcttcacccctatgaccaatagtataagatttcttttaaagtacttcttattataccggtgctgacaatccttttacaaaaatccggcttgcgcttttctgttaaaaaaggggagcttttttattacatagttattcttgactagtgggagctaaaaggtggcctttagtcatgttttttgtgttcaattgtttaaagataaagaaaggtgggaaatcactcaataacaatgctaaaggaggcagtaaaaatggaaagaaaccgatctgaattacaaaaccctgctttaagcaacagcgcaggcattaataacgatgtaggaatcaataacaatccacagacagctaatagccctactgctgttagcgctggaaaaagctgtagcagcaagctagtaaaaggtgttgttgtcggggcagttgtgggtggatgtataacattacttgataataaaactcgctcatctgttaaaagaagagccgttacattaaaggactcttctgcaaacatgattaatcaagtaaaagagaaccctcaagaaacaaaagaaaaaatggtgcagcaaatgaaaaacgcatcaaatttgctaaaagacgcaattaatgatgctaaacatttgtacgagcgtgtaaacgaagatttctttaagcaagcagaagatgtgaaaagcgttacgcatgatgcaaaatcgacggtagaagatgctaaaagtgatttacagcaaattggtgaaaaagtgaaagatgcaacttctgaaataagtaaggaaaagatgacgccagacgaaaaaccagaagctgagcgtgaaagaacataccagtctattcactaaaagggagatgttaactgtgagtcaaatgaatgaaggaactacaaaagacatgaataaaattgaagatacggtagataatttagggacggagaaaaaagaagcaattttgcagaattttgatacgtttactgattatttaactcaaaaagtccatgtcggtaaaaaactcgggttaaatgaggaacaattagcagctgctacaaaaaaagtggctagctatttagccaaaaatgaggagcctcgaaaccgagaagaaaaagtccttcatgaattatggaaagtcagcagtgaagaggaaaaggaagtcctttctcatctcattttaaaactagttgcgtaacattaaaaaagcatcccatctattaggatgcttttttaatgtattaagatgattgattttgagcctcttgaatcgttttatcccagtcaataccgcaatcatccgttgcacaagaagattgctgtgcgcagcttgcacattttccctgagtactcttgcggaagaattttgtcatatgataaagggcatatccaaatattaaaaccccaattaaaatgttaataatcaatgttattcactccttttaagaaaaaccaagtacttttccaatagtgtgtacaagcaaagctacgagataagcgacaaccaaagggtaggccacagcaaatgctgtccatttcaatgagccggtttctcgtcgaataacagcgacggttgctagacacggaacataaagaagaacaaacaccataaacgtataggctgttagcggtgtaaagaatgtcttcattgtgtcgccaagctgtccttcttgtactttataaatgatgctcatagtcgaaacaaccacttcttttgctaggaagcctgtaatcagtgatgctacagcttgccatgtcgcaaaacctaaagggataaatagcggagcgatagcacctccaataatagccataaagctattttccatatctactccaaaaccgccagggccagcgtaagatgatagccagataaatacagagccagctaaaataaccgtacctgcttttcggacgaaatttcggcctttttcccacgtgcttctccaaagagtcttagcttgaggtacgcggtaaggaggaagttcaacaataaaagttgattgttcgtctttaagaagcgttactgataaaattttcgttacaacaagtgctaaaataatgccaagcaagtacatagaaaacaccacagctgctccgttttgcacaaaaaacgcacctacaaacaaagcgtatacaggaaggcgtgctgagcagctcataaatggatttactaaaatggtcataagacgctcttttcgctgttcaattgtacgtgcggccatgatccccggtacgttacatccaaagctaataatcatcggaataaatgcttttccgttcaaaccgaaaaattccatgatacgatccattactacagcaattcgagccatgtatcctgaatcttcaagcagtgaaatgaaaaagaacaggacaaaaatttgtggtacaaatactaatacgccgcctacgcctgcgatgatgccgtccacaattaaatcatgaataaatggagcagcaccagctgcatttagaagagaatcagcgcctttactaagcgttccgccaaaaaaaccgtccagtttatcagaaagaggaacgccaatccaagtaaacgtaatattaaaaatcaaatacattaagccaagaaaaatagggagaccaagccacttatgcgtcacaattcgatcgattcgatctgtgaaggttagaggtgtttcgctgccctttatgatacactcgctggaaatgcgctcgataaatgctgtacgcacgtcgaagaaatgctcgctaagcggcttggttaatttttgtacagccgcttttcgaagctcaagcagctctgagtaactcgttttttcttttaacgttgattcgattacgctattttccgctaaaaattgaatggcaatccatctgctgacatccgcttttgtttgaatcatatgaattgcttgttcagcggtttccccgtaatttaattgaaataacggggcttttaaatcttgcttcaaagtggagagaagctcattaattccttttccattgcgggcaataattgcagaaactggaatatgtaatgatttgctaagcttttccaaatggaaagtcaatccgcgtttttccgctacatcaatcatatttaagccgattactaatggctttccatattccaaggcttgaatagtgagatgcatgcttctttcaaactgagaagcgtctacaatattcagcatactgttaaattctccggttaacaaaaagttagttaccactgcttcatctgaagaaagaggagtaaaatcatacacacccggcaaatcaaccagctggctgttttgctttttaatagacccaactttcttttccacggttacaccgctccagtttcctacgtattcataggaatctgttaatatattgaataaagaagtttttcctgtgtttggatttcctaaaagtgcaattgtactcatgctgtctcaacctcaattttagccgcatcgcgttttcggatgctaatcatttgaccttgacattcaataatacaaggtccccctaagatggttttttgcttcatgcatagttcgcagcctttttttactccaaaagaaagaaggcggcgttctaatgatctatctaaaaattcaatgtttttaacttttactttgtcgccaatactcacggtagttaaattcatcattcagcactcctgttaatgataatcattttcaatttgtatctatctcgattatacataaggttctaaaatcaatcaatgcttctagagcgttacaattaaaaatatatatttataactatatttttcaggtgaaattatgtacgattttagcagcaaattgtcaggagggatgtgagtggaggtaatcattcgcaaaatgagaaaagaagatattacgtctgttcaatacgtcgcaaagatgagctggtatgatacatatgaaggaattattcctagaagcgttcagaatcggtttctttcagaagcatactccaataaaaggctgctgtggcgcttgcgcaattcgttcatttatgtagcaactattgatgagaaaatcgtagggtacgctaactttttccgactacaaaacagaggggaaatagaactaggatctatctatatacttcctgcttatcaagggaaaggaatcggttcgcaattgttagaaaaaggaatgaagcgctcgaaggaattaaaaatcgtttacattaacgtagaaagggaaaacggaataggccgtgcattctatcaatcaaaaggtttccagcttgtggatgaatttgatgatgaatttgacgggcatttattaagaacgatgcgaatgaagctcatgatttaagcttgatatttagtgtgaacgttatcttaaaaagctgattttaaactttctgctaaaatcagcttttaattacagaataacgattgaccttattcttgtgaatatggtaacattaatcagaacttaatgaccgaaaatgtttttcggtcaaacggtcaaacggtcagacggaagtaaggattattggaggctaaaaaacatgaatatgattaaaggagaatggaaaaaaatcttttccaaaccaatgactattgttgtgatttgcggattgttatttgttccattactttataatgtcatctttttatctgcttactgggatccatatggaaaaacagatcaaattccagttgcagtggtaaatgaagataaaggtgctacattagatggaaagaaattgaatgtcggtcgtgattttgttgatgatttaaagaaaaacgataaatttgactggaaatttacgaacaaagaaaaagcgttagaaggcttaaaaaatgaggactactatttagttttagaaattccaaaaaatttctccaaaaatgcaacaacattaatggataaagatcctaaaaaaatgaaatttatctaccatacaaatgccggaaagaactattcaggcgctcaaattagctcaaatgcagtggctaaaatcaatgatcaaattaaagaagcagtcacaaagcagtatgctgaaacggtatttgacagctttaaacaagtagcggacggtcttcaaaaagcaagtgacggtgcaggagagctagaaaatggctcgaaaacgctgcgagataacatgaaaaaattagcagacagcacggttacattcgaagacggtacagctaaattagcaaatgggttaacggatgcacgaaaaggagcaacagatttaaatgctggtgcagctaagctactaaacggtgcggacacaattaatgaaaacttaggcagcctaaacagcggtttagggaagttagagagtggaagcagtcaattatatagtgcttctagtcaattagaaactggagctgttggtgttcgagatggattgtcaaagttacaaaatgcaaccaaacaacttaatgatggaacgcagacacttcaaggaaagcttccgcagttcacaagcggtttaaatcaagtggacgctgaagtgagcagcgttacgcagcaaattaatcaagcggagcaggaaattacgcagattaaacagcaggttgattcaaaaaaagcagagtttgaacagcagcagcaagctctcattgacagcattaacagcaacgagtccattcctgatgagcaaaaacaaacgctgattgcaggaattaaaaagctgacgtctcagcagtttatggatgaacagcagcaaaaagcagagcagttaaaagcaaaagtagataaagtgcaagagttatctgcggcgctgcaaaagctttctaaaggcggagaagatattcaaagcgcaattaataaaattgctgacggacaaagtcagctgtacgatggacaaacgaaagtatataacggtgctgttaaattagcggacggagaaaagcagttcaacaataaatttgcagagctgaacagcggtatagctgacgctcatgcaggagctggaaagcttgctgacgggcagcagcaaattgtggatggacttaagaagtctgaacaaggaagcgcagcgctagcaaatggtttaacacagctagaaaacggggcaaccaaattagcaaatggttctaaagagttaacaaatggttcgtctaaactatatgatggttcatctaaattatcagatggaacaagcgagcttcattcatctttagcagatggtgcaaaagatgcaaaagatgttaaagcggatgataaaacatatagcatgttttcaaatccgacggatttaaaatcagataaacaaaacaacgtagataagtacggtgtcggattagctccatacatcttatgtattggcttgtttgcgggaacgttaatgttttcagcggtatatccaatgaaagagccatcaattcgaccgacatcaggcatttcgtggttcctaagtaagtttagtgtcatcactattgtaggtatgctgcaggcagcgattgctgttacagctcttctatggggcttgcatttaaacgtaacaagcatttggcacttctatatctttaccatgattacaggtgtgacgttctttacacttatcttgttcttaacaacagggttaggaaaagtagggcagtatttagccttcattattctgttgcttcaaattggcggcagtgctggtacattccctaaagcacttgtgccggaattcttccaggcaattaatccgtacttgcctatgacctatgcaattcgcggtttccgtgaaatcatttcaattggtgatgatttcggctatgtatggcatcaggctggcgtacttggaatctttgcagcaatcttcatcactctttcattgataatgttttatatcaatgccagaaaagagaagcatcacacagaggaagaggcagcagcataatttaactaatataaaaagagagttccagtttaaaaaggaactctctttttctttatgatagtataggtttacgtataaaagaggggaacgtgaaggcatgcagcttacaaaattttcggtatatgaaagtgatcgtgtaaaaaagtggcaagaaggactgaaagaatgggacggttcaatatcggaacggatgataaacgaccgagctgaagatgaattttggcagcagtatttagagaaaatgtcttttaattcagtaaatgaccctgtagtaaaacagcttcaacaagaactccttgcttttttgaatccaaatgactctgttatggaaattggccctggctggggaaattatacgttttcgattgctgattatgtaaaagaacttacgtgtatggattgttcgccaagcattattcgctacttacaaaggcaatcagatgcccgctctaatctaaagttcatagaaggtaaatgggagtatgagcgtctaacagataactacgatgccgtagtaggaataaactgtttttaccgtatgcataatattgtcgatggtctcttaaatatgaatgattcggctaatcgtttggcggttataggcatgtcaacgggtccagaaaagcctcactacgtagagttacatagaaagcttgggtacgagattaaatggcgccgtaaggaatatattgacttactaaatattttatatgaactgggtatttacgcagattgtaagctggttcctataaccaaaacggtaacctatgagacgtacgaagatctcatcaagaagaactcgacaaaggtgctttctaaagatattgacaagttagaaactgagaagattattttacactatgcaaagaaaataaatggcacatatgaatatacgtatcaatatcatatggcttttatttattggaaaccgataaaaagaacccgttgagtaaaatcaacgggttctttttagtagggataaagctgtaatttagaataagcaatattaaaatcgtcgccgcttagaagaactttcaattcctgcttcttcacggtatttagctactgttcttcttgaaatttgaattccttcgctggaaagaagagacatgagtttttgatctgaaagaggttttaatttattttcttcggcaattaatgttttgattttttcttttataaaggcagtagaattgctttgttcgccatcagttcgctctaaagaattggtgaaaaagtattttaactcaaacagcccgcgtggcgtttgaatatactttccgttagtcgcacgacttaccgttgattcgtgacagtctattttttgagcaatatcttttaaggtaagcggctttagccccgaaatacccatttcaaaaaaatcttgctgatgttccacaatggctttggacacgttgtaaatcgtcgcattacgctgctcaatactattgattagccaagtagcttcatgaattttttcctgtacgtatcgatcggttgttacgcatgcagggcgatgaaccagcttttggtaggtgccgttaatttcgatgggcggaagcagctcgctatgaagaataagatgatagcgaccgtcaactttttgtaccgttacatcaggcgagatgtactttgtaagcgggacatggaaatctcctgctggacgaggatttaatgtccgcaagcagtcaacaatttcttgtacttcacgcatcgaaatagagtatttttttgaaatgttccgatattttttgttggcaatatcttcaatatcgtgttttaccacgtcgtataaaagaggaggctttgactttttggccttaatttgaataagcagtgaatcgacaaaattttgagcgcccacgccaatcggatcaaagctttgtaaaacgtgaatcatatcgttgacttcgttaattgaaacattcagcagttcggctgccaattttggctcaattgctaaaaagccgtttttatttaagtttccaattagaaattgaacgatgtgtttttggtgtgtgtgtaaatgatttagcatagacagttgctctaataaatgactctctaatgtcacagtttgatcagatatataattaaacggattatactcgtcatcggtataaccttttgaatatgaacgctgttctcgagtatcaaatgaatctttttgctgagagtcgccagcagacagtttaattacaggattttcattgacttgttgatgaagataatgaactaaatcggccgtagaataatttaaaatgttgatagactgacgtaattcaggtgtcatggccaattttaatagttgtttttgggataaatctaaacctaattgcatcattggatcacctatcattcttgagttttatttcgacaattctggctgcatcgttcgacatcatcatagctgaaaatgagaaagaattctatagtgttgtcagatgttcttacacaggggcgaatcgcaagaaagagtaggagaatagataaaacaaaaacgaatagcttctggcaatagctattcgtttgttttaacagagccgctaggagaacttagctgcaatttggggtgtttcccattcttctatctccccatgcgcacatcatatttaaaatttctcgtaaggtttcgccttcttcactgagtgagtactctactttaggaggaacttcattgtatacttttctattgaccacaccgtctttttctaattcttttagctgttgagacagcatttttttggtaatagcaggcatagctcgctgaagttcactaaaacgtttttcaccttcttttaataggcataaaataacgactttccatttcccggcgattacttcaagcgttgcttcaacaggtacattatagtggggtgctttcaccgttaatcctccattcataaacagatatgaaatatggatataataatttaatatccatagacctaggttaccggtaaggtacctggttacatgaaagtgccgtcttttgtaaacaacatgtatttattatactgaaaaagaacttttaattgaaggaagaaatgtaaaaggggagatcttgatgaaagctttactgctagaaggcaaagggaaagtaagtgagatgaaagtcggaaatatccaaaagccgcatccagctaaaggtgaaattttagttaaaattaaagctactgctttgaaccctgtagattataaaactggaaacggcggtaatcctagttggacatatcctcacgtattaggacttgattcagcgggcgttgtcgaggaagtgggagaagaagtcacaactgtcaaagtcggagaccgcgttgtatatcatagcgatttatcaaaaaaaggcgggtttgcacaatacggagtgacaacagcccacacagtttctcttattccgcaaggggtttcattcgaagacgctgcggctattccatgtgcgggatatacagcatatcaggcattgtttcataaaatgaacgcttcaaaagggcaaacgattttaattcacgcaggtgctggaggggttggagggtttgccattcagcttgccaaaaatgcaggccttacagtgctcacaaccgcatcttctgccaatcatgagtttgtaaaaagtttaggtgctgattatgtaatcgactaccgtaaagaagactttgtgaaaaaagtgctggagcttaccgatggaatcggtgtaaatttagtcttggataccgttggacgagacaatgcagacgagtcggtaaaggctcttgcttttaatggtcaaattgcattcatcgcaggaccgcctaatgtaaacgaggcgatttcgtttgcgcacccactatcgtttcatcaagttgcattaggaagtgtacatcagtctaataacgtaaaagaacagcaaaaacttgctgagatgggaaatagaatgcttttgcttttacaagaaaatacgctaaatgcactcgtggaaaaagtcatttcactagaagaagtgccagcagcattagatgaactggcgactcgtcgagtaaaagggaaaattgtagctgtaatagataaatgatagaacgaaaaagagattgagacataactacatcaattcaatctaaagacaaacaaatgaaataaaggagctcgtatcgaccatttattacaccgctgttgatttccatgcaaggcttcgctttccgcgggcggccgctgagcctcctcgttgcttgcgctcctgcggggtctcatcccttccgctgttcccgcaggagtcttcgccttgccctccaatcaacagctagaagcaactaactggatgaaccctacgtttaccaacacaatgaaaaggtccgaacgagtactcgttcggaccttccttaaactaacatactttttattttagccgcttttaaatcgtaaactgctgcgtatagagcttgtgataaaacccttgtttctctagcagctcgcgatgatttccttcttcaataatttgtccgtcttttaagacaaggatttgatctgcattttcaatcgttttaaggcggtgggcaatgacaaagcttgtttttccttttaatagattactcattcctcgttgaatatcaatttctgtttttgtatcaatgttggaagtagcttcgtctaaaattaaaatatcacagtcagaaagcatggctcgagcaatcgataaaagctgcttttgaccttcacttaaatttcctccgccagctgaaatcacggtattgtattgctggggcaaatgtttgataaacgaatgagcattggccatctttgcggcgcttttcacttcttcgtcgctggcatctaaccggccaaatcgaatgttatccgcaatcgtaccggaaaataaataggtatcttgaagaacaatgccgattcggtttcgtaaatcatgaatgttatagtcactgatggaacgtccgtcaattttaatgtctccgtttgagatgtcataaaatcgtgtgagcaagttaatgatggttgttttaccagaacctgtcggaccgaccaaagcaaccatttcacctttttttgctgtcagtgtaacattttttaaaatcattttttcatcgttatagccaaatgatacattctcaaaagcaacgtctcctgcaaattttgtaacagaaagagcgtttggcttgtttgtgacgtccggctgctcatccataatcgcaaacacgcgctctgcgccggcaatagccgaaagaatggtgtttactaagtttgccatttgactgattgggcgagagaactgacgtgagtagttaacaaatgaagcaatcatcccaactgtaacgctaccttgaacagccataaatgctcccgctccgatcactagtgctaagcctaagttgttaataaagtttgtgacaggacctaaaaagcctgaaaatgtttccgcttttgttgctgaacttctcagctgttcatttcgttcattaaaaacagttaaaaagtctttttccttactaaaaagcgtaacaacttctcctccagagattgcttcttctacaaagccgtttagctcgcctaagtctttttggcgtttgacaaaattttcactgcttcgttttaatatttgtcgaacgattataaccatcaagggaataacaatcagcgtgataatggcaagaatccagttgagcgagaacatcgcaatggtaatgccgactaaagacaaaatagaggacagagcctgaataacgctttgacttagagcgctgtttagattatcaatatcatttgtgactctgctcattaactctccgtgagctcgtttgtcaaaaaagcgaagggagagagtctgaagctttgcaaataaatcttgtcgaagcattccaatagtcgtaaacgaaacgttcaccattaaataggtttgcagccatgttaacaaagatgtcgtaatataaattcctgcaagaataagggacattcgtatcgttccgctgatatctttgggaataatatgctcatcaataataaccccaattaaataagggcctaataaattaagtagggaagtcacaataactaagattatcgcagccgcaagcggaggttttcgtttccccatatatgaccagattctgtacagtgtttttttcgcattttttggcttaactacagggcctttcatcattcctctagggccacgaatagagctcatttgatttttaccttggttattcactaggcaacgcctcttttccgccttgtgcaaggtaaatgtcgtaataaagagagcgataacgaagcaattcttcatgagtcccttgttcagcaattttgccttcatccatgacgataatatgatcagcgtggagaagagacgaaattttagaagcaataatgataacggtcgcatctgcaaactcttcttttaaatgttttagtacctgcgcttctgagacagcgtctaatgccgaagttgcatcatcgatgaccaggatagcgggctttctaacaaatgcacgcgcgattgaaagacgttgcttttgccctcctgataaattggttgctcctcgcgttaaaggatactcatatctttctggaagtttttcaataaactccgttgcgcatgcaaaatccgcagcatcttcaatttctgaggaagaagcctgatcttttcccattcgaatattcatatcaatcgtgccggtaaacagcgtagctttttgaggaataaacccaatggatgagcgaagcacttttacgtcatagtccgtaaggttttttccatctacgaagatttcgccgtcatcaggatcatataaccgggaaataagttttgcaagcgtcgacttcccgcttccagtagagccgataatgccaatggtttctccgtgtctagcagtgaacgaaatatcttttaatacgttttcgccatttttactatagctgtatgtaacgttttgaaacgatagatcacctttaagtctgttgatttgagcagcagagtttgctggagggatgtctatttttgtttttaaaacagaatcgattcgttcagctgaagggaatgcgcgtgtaatttgcatcagcatcatgctgcttgacataagtccgtttaaaataatcgttaagtaattaataaaagctaaaatcacacctgcttcaatttttcctgcttcgacttgaagtcctcccagccatagagtagctaccattccgatatttactacaaataaaataacgggcattaaaagcgaaataagctgaacagcactcatattagctcgcgtcaaggaactgtttgcttctttaaactgattgatttcatacgattctcttacatacgcttttactacacgcatccctgataaattttcttggacttttgtatttacacgatcaacgctttgctgaacttttttaaaaagttttccagctttcgtgatcacaaaccaaatgcataaaaataaaatagggacgaccacgacgataataggaaacaaagaacgagcggttaataacacgatcacaatacttcctgcaaaaagtaaaggacctctaactaatacttttagcgtcatattcaatgcgttttgaatactcgttacatcatttgtcatgacggtaattaagtgaccagtccctagtttgtctctgttgctgtttgagaggttttcaattttttcaaaaagcgatttccgaatatcggtagaaaaatttactgccgcttttgtgctaaggatggcgcagacgataccggcagctaagccaatgactgctaacacaagcataaggatgcttcgagtgataacatatgtttgatcgttgtttgcaatgccataatcaatgatatgctgcataatagtaggctgaagaaggtcagctaacacttcaattaccatcaatagcggggcaaacagcgcgagccatttgtaaggttttaagtaagggtacaaagatttaattgtattcacacattgtggcactcctttctgtaaaaaatatggtaacatagaataagtttagaagtttgtttcaagcaccatttattatacgccaatgcaagcagaaatccactttttgagagggtcaggtatgcaatgaatcaaacattacgagtacatcatccgctttttggatctttgttatatgactcggcctgggttggagaaaaacaggtcactttctttggacaaaaacaacaggtgttgctgacaattgatggagataaagagaagccatttcaaaaacggcaagaagaggcttttcaagctttttggcttcaaggtgaattattgttaaagaggacggaaaaagctctttttgattattatcaacaggtgcgagatgaatacagaactcaagttgaaaaagacgtggtagacttattagttccgaatgtaaaaaagcgaaaagacatcgggtttttagttgagtgtattcaaatctttgttcctgaagcacctcatgatacaagagaacttggtttgttttttgaatgtacgtgggaagaagagcatatgttagctgtaaagtttagaaatgaacaaatttccgctattggtttacaagaagatttattctagtaaaaagccttgaagcaaagtgcttcaaggctttttggcattaatgtttgacgggctcttcgattcccatacctgtatttgcttttactaaaatctcatcaaatttcttttcgtctgcttttttagacgaaagaagtgttcctataaaagcagctaagaagcctagaggaatagagataataccagggtttgttagcgtaatgagcggttcacctacaaagatagcagctcccggctcaggtgcccacacgtttggactaatggcaactaaaaacagggagctgaatagtccaaccagcatgccagtgactgctcctgctgtattaaaacgtttccaaaaaatagtgagaagaataattggcaagttagcgctcgctgctaccgcaaacgcaagtgccactaaaaatgccacgttcatgttttgagcaaataatgcaagaataatagataaaatggataccccaatagaagcccatcgtgcagccactacctgttctttttcagtagcagctcctttacgcagaatatgactatagaagtcgtgcgcgaatgctgaagctgctgagagcaccagtccagctacaacagctaaaattgtagcaaatgctacagctgaaacgaacgcaaaaagaaagtctccgccaagaacttgagcgagcagaggagccgccatatttcctgctgcatttgctttgataatatcatcatatcctacaaaagcagcagcaccgaatcctaaaaagattgtcataatgtaaaaaacgccaatgatccacgttgcataaataacagactttcttgcggtgatggcatcttttactgtgaagaaacgaataaggatatgaggcaggcctgctgtaccaagaacaagagctaaattcaacgaaatcatgtccagcggatttttgaatttatttcctggatttaaaaagccgtcaccaagaggagttgcagttttcatctcggaaaacattttagctaagctaaaatcaaattttgaaaatacgataatggaaataatgaacgtaccaatcatcagaagcaaggctttgacaatctgcacccagctagtcgctgtcattcctccaaatacaacgtaaaccgtcatcaagacgccgacaatcaagacagagtacacgtaatctagaccgagtaataaatgaattaatgctcctgctccaacaagctgcgcaatcatataaaaaatggaaatggtgatcgtgtttaacgcagcaactcctcgcactttcttttcgttaaaacgagctgctatcatatctgccattgtgtactttcctaagttgcgaagtggttcagctacaatgtataacacaaccaggtaggcaactaaaaagccgatgctgtaaaaaaaaccgtcaaatccagaaagcgctaccattccagctatgcctaaaaatgatgcagcagacatataatctccggcaatcgccataccgttttgccagccggttaaacttccatctgctgtataaaagtcactggtcgtttttgtccgcttggatgccgcatacgtaatgattagcgtaagacctacaatggctaaaaaaagtgaaaaagctagtacgttcattcatttaaccccctatttaatttgcagcttcttttttaatcgtgtcaacaagttcatcaaatttcgaggctctttttgtgtataaaatgcatagggtccaggtcatcacaaactgtgcaaaagcaaatacccacgcccaggtcatagaagcaaaagctggtttgtttaagacggttgtgtaagccgttaaaataggcaaggtaaaataaaaagcaagaaaaaacagagagagcggtaaaataaaattgcgtttttgtttcaaaagcttttgaaatgaagcagactgtgcaatttctgtgtaatcaggagaggaagaagcattgtttaccttctttaaagaattttcattcatcgccaagcggaattccccctttgataataaatagatgaagcgaaaagcttcatatcacttgaattatattattttcggaataaaaagtaaattctgtcttttttgtgagaatggtaactgtataagttttttaatatactgaaggttcacactaaatgcatactgccataataaaaaaagaacaacattcaatacaaaggaagaatcattcgaaaaagaaatattgaaattaatccttagtttcttttacatataaggcttttctttattatttagacattatttttttgtttgatcttttgaaaaagaaaagaagataatgataaaatcatatgcccacaataatgcttagataggaaacaggttgagaaagtacgctattatttagagatggttataaatagacaagatattatgaaagatttctatatgaatgatattttttctttatagcaaacaaatcatgtgactacttatataaaagagaaaaggtgaaataatggcatttggaattaaacgcccggaactaaacgcatggaaagcagctgttaagcgaggagagatcgcatttttaactcattattggcttgatgagcgttttccacatgcaactactgtaacaaaagtaggttgcagtgacttaaataagctgattaagtggggaaaaaagtatggtattcccgctaagtatattgataatcgatccggctatcctcatttcgatttactaggtgagcgtcagaaagaaattatgaaaaaggaaaatcagctggagcagctgaagcgatttgaagaagttaacgagtgaaaagcaaaactaatttaaaaaactgtaaaaaaattctattgttaaggctttttttatgtttaaatagaaaaaacagtggaatagattaagaagaacaattacgtcatatattctctcttatagggaaaaaccttagttaagtttccttatttgatacgataaagagctttgctttataataaaattgtggttcggataaaaggaggaagaagggcatgtccgaggttggaactttaaaaaaaggattagatatcttctctttgcttttaaaccgtccgaatatgactattccagaaatgatggaagcgctcggttttaataagagtacgatgtatcgtcttgtgagcacgcttgaacaaaacggatttattgtaagaaacccgtctaaccgctatacggtttcaccacaactggtgctggcactcgtgcaaaatacgatgcatacgaactatgaaatgaattggctctctgttcctgctatgcagaagctgagtgaagagaccaaagagaccatttacgcgggaattctccatcataaacaaatggttacaactcaggtggtcaacgggcaatatagcactcgtacgcattccgaagtaggaaataaaaagccgcttcatgcaaatgctattggaaagtgtattcttgcttatcaagaggacagcgtacaaaaatctatccttcatgaactttcgcttgaagcttatacagatcgaacgatcaccgagctggacgagcttgaagctgatttggctttaagtaaggaaagaggatatgctgtcgatgatgaagaacgggagccgggcgttcgctgtattgcagctcctattttcagaaaaggaaaaataatggcggctattgctttatcaggtccatcctttcgtatttcacaagagaaagacgaagaacatgctgcacttgttaaacagtgcgcagaacaaatttcacaagcaattactctttacgaataattcaatagtaaaaaaggggatgaacagcaacatggaaaacttacagtcaactacgaccttagcaaacggcgttaaaatgccctggttaggtttaggtgtttataaagtagaagatggtcaagaagttgtagattcagttaaatatgcaatcaaagctggatataaaagcattgatacggctaaaatttatgaaaatgaagaaggcgtgggacaagcgatcaaagaatcaggtgtttctcgcgaagaactgtttgttacatcaaaagtgtggaatgcagatcaaggatatgacacaactattcaagcgtttgaaacaagcttaaacaagctaggtcttgaatatttagatttatacttaattcactggccagttgaaggtaagtataatgatacgtggaaagcacttgaaaagctttataaagacgggaaaattcgtgcaatcggcgtatcgaatttccaagtacatcatttagaagacttgattgcagatgcagaagtcaagccgatggtaaaccaaatcgaatttcatccacttttaacacaaacagaagtgcgtgaatactgcaaaaaacaaggaatccaagtggaagcatggtcaccgcttgcacaaggtgagctgcttgataacgaagtgttaactcaaattgctgaaaagcacggaaaatcaactgctcaagttatcttacgttgggacttgcaaaacgaagtagtaactattcctaagtcaacaaaagaacatcgtattatccaaaatgcagacgtatttgattttgaattaaatgcagaagaagttgaaaaaattaacgcattaaatcaaaatcatcgcgtaggtccagatccagataactttgacttttaattttaaagcaagactaaaacgtcttgtaagataaataataaacaaagcgctattgtcattcatgcagtagcgctttgtttattaacaaataaatgtgatagtcgaacgaggaggaaaagtaatgaagatgtcaggaaacactattttaattacgggcggagcgtccggaattgggttggcgcttgcagaacggtttttaaatgaaggaaatgaagtcattatttgtggaagaagggagtcaaagctgcaagaagcaaaagaaagattcccttcattacatacaaaagtgtgcgacgtatcaatggaagaaagcagagtagagctagtaaaatgggcgactgaaaggttcccgaaattaaatgttattgtgaataatgcaggcattcagcagcgcgtaaatcttttacacatgcacgaagagtggcagtattacgaaaaagaactaatgagtaatgtaagtgctcctattcatttaacgtcgttattggttcctcattttgttcagcaagaacgtgctgcggttattaatgtaacgtccgggctgtctttaacacctggagcatgggtaccaatctacagcgcaacaaaagcggcgttgaggtcgtttacgattagtctaagacatcaattagaagaaacaaataccgaagtgatagaaattcttcctccagccgtgaacacggatttaggaggaccgggacttcatacatttggagcaccgcttgatgactttgctgattcgatatttgaagaattgaaaaaagataaaatcgaaattggctatggagacagcgctaagaggcttcatgcttccaaagaagaaattgagaaagctacagcacaggcttggaatggatttttgaaaaaaaatcctgaattttaaagacagcaaacaaaaagcttcctaaactcgtcaatagtagcgggttataaaaagcgtgtgtccataaataaatgaacacacgctttttagcattaacgatctacagtttgtctaattcgtttttccattttttcaagcatgcggaggtactcatcctgttcttcaggagttagagcaaaaagcatgtcttgccaaaataaatttcgctgctcaattacatagttcactaatgtttcgccagcctctgttaaggatatccatacaattcggcggtctttttggtcacgtacgcgcttaatgagtgcatcatcttctaattgatttaataaaatggtagtagctccggaggttagctttagatttgaagaaatttcagctaccatacgtttagagctgactccaatgaattttagaattaaaaatttcgtaatggtcaaattatagggctgctcactgattttatcttccaagagctttcgcttgagttcaaataatgaggttttaacttggtcaagtttttctagtttatctattaactgctgatccattataatcaccttttctttatcattataggtgttaaacaattgctgctagttacctattggggtttatgtatatagggagtttgttccgaaaaaaagaagctgtttttgtggataaccctatgcttatatatctaactttaaagtaaagtaaagtacttgtaaagaaaccaaaacttttaagttgtatttcagttaaagatgtagtaaagtattcagtcgggaaaactttatgaaacataaatgtttagttttaaaaataaattaaaatcaaagttatttacaactaaatatctttgtgataaagttatctagcgtaatacttaactgaatgaaatattaaggaggtaaaataaatgtcaagagggcgtttaattttaatgaactttatcggaattattgtagtattagctttaattattggtgggggatactattatattcaaaaatctaattatgtatccacagacaatgcaaaagtgtccggcgacctttatacagtagtagcgccagcggcaggtaaagtagcaagctggaacgttgaagaaggtaaagatgtttcaaaagatgatgaggtagctaaaatccaatcagaagatggagaaaaaacagttacagtaccagaagacggtaaaatcatcaaaacacaggtaaaagaaaatcaaatggttcaagctggtcaacaaattgctagcgaagtagatatgaataacttattcatcattgcaaacattaaagaagacaaattaaaagatattgaagctggcgatgacgttgatgtaacagttgatggagatactaaaacaacaatcgatggaaaagtagaagaaatcggttatgcaacaaactcaattttctcattaatgccaagttctaattcagacggcaactatacgaaagtatcacaaacagttcctgttaaaatctctatttctaactactctgaaaacgtactaccaggtatgaacgcagaagttaaaatctctaaaaactaagaacgtacatgattaagaagagaagaaaggaggaaggaactgatgtcagcaaacacgatacaaccagaggaaagctcagttaaaaagcatatcccgctgctagtcgtacttatgcttggattgttcttagcaattttaaaccaaacgctgctaaatgttgcgattccgcatctgattacagagtttggcgttacggctaataccgcacagtggttgcttacaggatatatgcttgtcaatggtgcacttattccattatcagcctatttaattgaacgttttggagttcgtcgcttattcttatttgcaatggcctgctttacaataggtgcacttatctgcgggattgcgcctactttctcgattatgctaatcggacgtctggttcaagcagtcggaggcggagtgctagcacctctagttatgaccattatcgtatttattttccctcctcatatgcgcggaaaaggaatgggtatctttggtttagccatgatgttcgctccggcaattggaccgacgctttcaggatgggttattcaaaactatgactggcatattttatttacgggaatggtgccactaggtgcgctcgtacttattattgcagcttttaaattaaaagatattaaaccacctcaaaatgtaaaagtagatctaatttctgtgtttacatctcttgcaggtatggctttacttctatacggcttcagtgaagctggaaacgatggctggacggattcagttgtattgtcaacgatgattggcggtattgtcttattaatcatctttgtcgtgcagcagcttcgacttaagagtccattacttgatgtgagagtatttaaatacagtattttctcattatctaatatcattagtattgccattacaattagtatgtatgctggtatgttcttattgccaatttacttgcaaaacattcgtggctattcagcatttgattcaggtttattaatcttgcctggtgcacttgttatgttagttatgtcaccaatttctggtacgctgtttgataaattaggaccgcgtccactagggattgtcgggatgttgattacagtggtgacaacatttgaatttacaaaattaacgcttgaaacaccgtttagtcatattgttattatttatatgatccgtgcattcggtatgtcattattgatgatgccaattatgacggctggtttaaatcagctgccggcaaaattaagcagccatggtacatcaatggcgaacacgcttcgtcaggtgagtggttcaatcggtatcagtttaatgactacaatctttacaaatcgcacaacatatcatgtgaatgaaatgagcagttccatgactacatccgatccattctttatgaataacttccaggcatttgtgcaaaagattgctcaaacgcttcacctttctcaaacagaggcgcaaaaacaagctttaacaacattagctggaaaagttcaagcgcaagcaactgtacaaggaattaacgacgcgttttattggacagttattattgccattattggattgattttaagtttcttcctacgtgatgttcgtaaagatgcagtagtagaagtagaagagacagaaaaagaaacaacagacgatattcgtatgttaccggcaccaaaagatatgaactcataagcaacggagggataaaggatgaaaatttgtatcgtatatgatagtgaaggcggacatacagaggcattagcaaaagcgattgcttctggcgccgagctgtctggagaagcaactgtatatgtaaagcatgtagaagaagcagatgtacgtgaactgcctgaaatggatgctattatttggggctgcccagggcattttggaacaatcagttcagggttaaaaacgtggattgataaattaggttatttatgggcagaaggtaaattaattgataaagtaggtgcggtgttctgtacaacagctacaacgcacggtggcttagaagcaacgcttttaaatttaattacaccgatgcttcatcaaggaatggttatcgctggcttaccaggtaacattccagaaaatgcgctgtacggtacttattacggtgtgggaattacttgtccaatcgaaggtgacgaattattaacagagaacgaccaagcgctaggtaaagcgttaggagaacgtgttgttcaagtgactaaacgaatgacacaaggacagtaggtgacagtatgttaggtattttactgatcgttgtagctgtgattctggttgtactaattattacaatgaatgctaaagcatcatcttctaagcgccagcgtacagttccacctaaaaaagaagcggctgcttcaaatgctcctaaagagccaaaagtagaagagaaaaaagtggcagaaaaaaaacctgcagcaccaaaagaagcaccaaaagagccgcaggccaagacggaaacgagaacatctagacataagaaagaaaaagatgtcatgaacgatgatatgtatcgtcaagtgctgcaaaagtttagagaaggcgaaaaagacgacacggtttttacaaaagaagaacgtgacgttatgaatgatgacgcttttcgtaaggctttaagatcgtttaagaaaaacgatagtgaatgagtttcttctattataatagtacggaataaaatagatagaaaataagttataagcattccgcgaaaccagccgctctccccaggctaggtttcgcttggagtgcagcagggggctgacatgttaacatcgactccctgattataagaaaggggacgtcaaaacatggaacagctcacatttattgaagaggtccagagaatttcgatatcccttaacaaaaaggtaatgacagagataaaagaaaggttactttcacaagggattacaccttttcaatatcatatcttattaattatcggtaagtgcagtcacattggggtaaccaagctggcagaagagatgcgcgtcaagcctagtgcgattactcctgttattaatcgtttaatagacttagagttagtttcacgctatcactctaaagaggatcgccgcaaagtaaacattgagttaacagctaaaggtgaacaagtgattgaagaagcaaatgaaattgtgcaaaagatgattgctcatttcttttcttgctatgaaccgaaagatcaagagcaatttttgaaattatttaagaaactagacgctaatatctaatgaaagaaaaatcacttcttaatgaggtgattttttttaataaaaagattgtcaacttcacttttccatgttattatttgtgtaaacggttacatatatgaagggagggaaataaagtggtaacaattcgtgatgtagcaaaagaagcaggcgtgtccgttgcgaccgtttcgcgcgttttaaacagtacaggatatgtaaaagaagacacgcgtgtgcgagtaatgaatacaattcaaaaattaaactacagccctaacgaggtagcccgttcgctttatacacgtgaatcgcgtttgattggtctcttgcttccagacattacaaacccttttttccctcagcttgcacgaggaatagaagatgaagtacatagccatggatttcgtttaattcttggcaatagtgatgagcagttagagaaagaattaacctatctccaaacgtttacgcaaaaccatgtagtagggatgatcacggcaacaacaagtctagctcagaaactatatgaaggtcttacatttcccgtcgtgtttttagatagaagttctgatcagtatccatccgtttatgctgatggttttgagggtggaaaacttgctgcagaagaaataatcaaaagaggaagtaaaagaattacacttatcaaaggtccagtaaatgtaaagcctgctcaggaacgctttcaaggctctctgtctgttttgagtcagtctgatgcagacttttacgtattaaatacaaattctctagcgtttgacgatgcacagaaatgggcaaaggaaatctttcaaaagtaccctgaaacggacgggattattgcaagtaatgacattgtagccacagccgttttacacgaggcgtttcgattagaaaaaagcgtgcccgatgatctacaagtaattggttttgatgatattccgcaaagccgcttttcgtttccagcgctgtctacaattcgtcagcctgcttatgaaatgggcaagcaagcagcaggtctgttaatgaaatgtattaagaaagaacctttaattcaaaagcaagtacaactacccgttacgtttattgaacgaaatacgacacgaaaggttgaggaacatggctaaagtaactgtgattggaagttcatcaatggatttagtagtgacatcaaatattcgtcctggagctggagaaacagtgttaggagaatcattcaaaactgttcctggaggaaaaggagcgaaccaagctgttgcagcagcccgtcttggagctgatgtgagtatgattgggtgtgtgggcgaagatcattacggaaaagcaattctggagaatttcaaatcaaacggtgtatccgtgaaaaatgtgaaaccggttacagatttagatagcggaacagctcacattatactcgctgaaggagataacagcattgtagttgtcaaaggagcaaacgattatattactccagactacgtagaaaaagcaaaagaaaaaattaaagacgcggatatcgtacttattcagcaagagattccagaagaaacggttgaatatgttgctcagctttgtcaggaacttaaagtaccgcttttgttaaatccagcgcctgcaagaccattaaaagcagaagtgattgaacaagtttcttacatcactccaaatgaacatgaagcagagcttttatttgaaggaaaagaaaaagaagaagtattaaaacaatatccaaataaattgtttattacagaaggaaaacaaggtgtgcgctattttaacggcgagaaagaagtattggttccttcttatcaagtagaaacggttgatacaacaggagcaggagatacatttaacgcagcacttgctgtggcacttgccgaaagaatgggttttgaaaaaggaattcagtttgctaatcgcgcagcttcgctatccgtcactaaatttggtgcgcaaggcggtatgccgactcgaaaagaagtggaggagagtctgtaaatgaaacgtcacggaatgattaacagtcatattacaaaaatactaacagatctaggtcatacagacactattgtcattgcagatgcagggttacctgttccgagtgacgtgcctaaaattgatttatctttaaagctaggggtgcctagctttgaagatgtagtagtagctgtgttagaagatatggctacagaaaaaatagtgattgcttctgaaatgaaagaaagaaatcaaaaggcttacgagttgatggagaagcaaaacatcttagtagaagaagtatcgcatgaacaattaaaaatgctgacaagcaaagcgaaagttgtgattcgtacaggagaagcaactccttatgcaaactgcattttacaagcgggagttattttttaaaagaggtgaacagcatgcatattgcaatgagagggattcataaagcctttggagcaaaccgtgtactaaggggcgtggattttgaattacatgaaggtgaagttcacgcactaatgggggaaaatggagcggggaaatctacgctgatgaatattttaaccggccttcacaaaaaagatgaagggcagattctgattgatggcaaagagacgtattttcaaaacccaaaagaagcagaacaaaacggagttacctttattcatcaagagctgaacgtttggcctgaaatgacggtgcttgagaacttatttattggcaaagaattaaaaacgcctttaggttttttaaaaacaaaagaaatgaaagcgttagcaaagaagcagtttgaaaaattagctgtgaccattcctcttgaccaagaagcgggactttgttctgtcggacagcagcaaatgattgagatagccaaagcgctgatgacgaatgcaaaagtcattatcatggatgagccaaccgcagcgcttactgaaagagaaattcaaaagttatttgacgtaattaatgcgctgcgaaaacaaggtgtatcgattgtctatatttcacatcgtatggaagagattttcgctatttgtgattccattacggtcatgcgtgacggacagacggtagacaaaaagccgattccagaaaccagcttcgatgatgttgttcgcaaaatggtaggaagagagctaacggatcgatttcctgctaggacatctcctaagggagacgttgtatttgaagcaaaaggcttggagagaaaaggtgtatttcaagacgttcatttttcagtgcgatcaggagaaattgtcggtgttgcggggctaatgggagctggcagaaccgaaattatgcgcgctatctttgggcttgatccgttagaaaaaggcgaaattatattaaatggcaaacgggtcagtatcacaaagcccgaccaagccattaaattaggtctcgggttcattacagaagatcgtaaaacagaagggctcgtcctggatttttctattcgagaaaatattgcgcttccaagtctattcagcttttcgccaaaaggctttattgaacaaaaaagcgagcagcaatttgtagatttacttattaaacgtttaacgatcaaaaccgagtcgtctgagacgagtgcgggtaacttatcgggaggaaatcagcaaaaagtagttatcgccaagtggattggcattggaccaaaagtgctgattttagatgaaccaactcgaggagttgacgtcggggcaaagcgtgaaatttatcagcttatgaatgaactgacagacagaggcgtggctattatcatggtgtcttcagagcttccagaggtactcggcatgagcgatcgcattttggttgtgcatgaaggaaaaataacaggtgaactgacaagtgaagaagcaactcaagaaaaaattatgacatttgcaacaggaggtcagtaaaatgaaagcaaacacagcgatcaaagaaaatcgcgttgataacgtgatgcaaaagctaggtccgttactaggtctatttattcttattgtcattgtatcgattttaaatccaagctttttagaacctttaaatattttaaacttgctgcgtcaagtagccattaatgccttaattgcattcggtatgacgtttgtcattttaacaggcggaattgatttatcggttggctctatacttgctttatcaagtgcgttaatggcaggtatgattgtgtcaggtgtagatcctattttagctattttaataggatgtgtgttaggagctgtaatgggtatgattaacggcttgcttattacaaaaggaaaaatggcgccgtttattgcaacgctagcgacgatgacaatttttagagggttaacgcttgtttatacagatggaaatccgattacgggcttaggcgaaaactattacttccagttatttggccgcggctattttctaggtattcctgtcccggcaattacgatggtactagcatttgctgtcctatgggtgattttgcataaaacgccgtttggccgtagaacatatgcaatcgggggaaatgaaaaagcagcatttatttcaggaattaaagtaccaaaagttaaggttatgatctactcactagcaggattattggcagcgctatcaggagcgattttgacttctcgtttgaactctgctcagccaacggcaggtacgtcttacgagttagatgctatcgctgcagtagtactgggtggaacaagcctttctggaggacgtggacgcattgttggaacgttaattggtgcgctgattatcggaacgttaaacaacggcttaaacttactcggcgtttcgtccttttaccaaatggtcgtaaaaggaattgttattttaatcgcggtattaattgatcgcaaaaagtcagcttaggagggaaaaacatgaagaaaatttggctcgtgctattatcattttcattattactgttaggggcttgttcacttcagcctccggagtgggcgaaaccatctgaaagtaaaaatttaaaagatattaaaattggtttatccgtttctacattaaacaatccgttttttgtttcgctaaaagaaggggtacaaaaagaagcaaaaaaactgggcatggaagtagttgtagtagatgctcaaaatgattcagcaaaacaaattaacgatgtagaagatttaatgcagcaaggtgttaacattctgcttattaatccaacggattcagctgctatttcaacagctgtacaatcggctaataatgtaggtattccagttattacactagatcgttcagcagaaaaaggaaaagtagaaaccctagtagcttcagataatgtaaaaggtggtcaaatggctgctgattacattgtgaaaaaagtaggggaaaaagctcaagtagcagaacttgaaggcgtgccgggagcttcagcaactcgtgaacgaggaaaagggttccacaacgttgcggatcaaaagctagatattacggctaaacagtcggctgattttgaccgtacaaaaggcttaaacgttatggagaatgttcttcaaggaaatcctggtatcaaagccgtatttgctcataatgatgaaatggcattaggagctattcaagcgattaacagctcaggaaaagatgtgctagtagtagggtttgatggaaacgacgatgcaattaaagcggtaaaagaagggaagctaggagcaactgtagctcagcagcctgttttaatcggtaaacttgccgtaaagtctgctaaaaatgttcttcaaggcaaaaaggtagataagcaaattccagtgcctttaaaactagtaacctctgacaaataatggttttatacgtgtgcagaaaaaagacgctcatttgatttatgggcgtctttttatgtatataaagtgtaaaaaagaagtgaaaaagtcataactttataaatagtgtaggaattatgtaggtggaatttatgtaataaaaagtaaaaaacaccgaaaaaagacggtgaaacacataattttctgtgaaaaatttgtaatatacctgtaataataagcgtttatttctatttttaaagagcaaatatgccctgtttatgacaaaaatatatcttttttaataaacagtaaacctctctatcaagggattttggtgatgaattcccagaaagagattcttggttatacagattatgggaaacttttaactgtattgtaacataaacagatagttttttatggtataactatgtctatgaggaaaggggactattactttatgaaaatttttaagcgtatgactcttgcagcagtcacaggaattttcttcatgaccggcatcacagagactcacgcccaatcgaatgaagaagcgctccagagtactgaaaataaaattaaagaaacagaaaaggctgttcaacaaaaagagaaagagaaacagtctatcaattcagatgttcaaaacattcaatcacaattaaattcattacatacagtaatctctagcaataaaaaagagttagcatcgactgaaaagcagatttcagaagcgaacaaaatgattgagaaaaagaaaaaagaaatcgttttgcttcaggaaaaagtgttaagtcgtaaagatattattgaaaatcgattagttgctttacagcaagacgataaaacaagcgttgttattgatacattaatgaatgctgataactttggagattttgtcgcgcgtatgggtgctgtcacaacgttattgtcagcagataatgatattttaaagcagcatcaaaatgacttagatcaaattgaaaaagataaaaaagaaattgataagcaagaaaaagtattagaagcagcaaaaggtagcctagcagctaaacaagctgaattagataaaaacgttgcgaaacaaacagcaacgttaacaactatgcaagaaaaatacagcacggtcgtaaatgaaattgatgcagcttcttcagaaaaagcaaatcttcagtctgaactaacaggcattcaagataagattgcaaaagaaaaagaagcagctcaaaagcaagctgagcaagtggcaaaacagcaggcgactgaaaaggctgaggctgatgcagaagcaaagcgtcaagctgaactagcaacagctaaacaagaagtaaaaacagagccaaaacaagaagtaaaaacagctgcagctacagagaagaaagcagccgtttcttcagaagcaaaagaaacgaaaaaagaagaaagcacacaaaagcattctggaaaagaaatgtatgtagaagcaacagcttatacagctaattgtgcaggctgcagcggtgtaacagccactggacaaaatgtaagttcaggcactcataaaattattgcggtagatccatccgttattccattaggttcaaaagtatacgtagaaggatacggagtggcaacagcaggtgatacgggcggtgcgattaaaggatatcgaattgacgtattagtaccttccgagtcagctgcaaaagcatttggacgtcgtacagtgaaaattacggtgttaaattaacgaaatagactgagacaaaagcagtttagttgaagaaagatccgaacgagtaatcgttcggatcttttcattgtattggtgagcaagttgctagctaatctatgctcttttcgttaccatacaataaagtaaatggaagaaaaggagtgggtaaaatgaaagtagtggatccagcggtacaaagtgcaaaagacaattatcatttgctaacaggtgtcgtcattcctcggccaattgcgtttattacaagtcaaaatgatgacggtgtagtgaatgccgcgccgttcagtttttttaatgtagttgcggcagagcctccgctgattgccgtttcggtttcgagaagtgaaggtcaaatgacgaaagatacggccaaaaatattagtgcatctaaagaatttgtagttcatcttgtagacgaaagcttagtggaacaagtgaatcaagcggcatcttcttatccttcttccgtgagtgaagtcgaagaaacagggttaacactagcacccagcaaaaaagtgcaggttcccggaattcaagaagcaagcattcgaatggaatgtaagcttcaccaaattgttccattaggaacggatgaggcatacagctcagatttgtttatcggtgaagttgtgatgtttcatattagtgaaaaagtgatagaaaacgatcgcgtttctgcagaacgtgtgaagccagtcagccggcttgcgggttctaactatagtaaattggggcaattattttccttagaacgtcccaaataagcaagaaagtgttacttatgtagcaaaaaaatagtatacattggatttttttaaataagcgattgtgttctgtttcaacaacgacagtacattcgctttttttcatgaacgaaaaagttaatagaaaccataataacaaaatcaatttagaaaaaggcaaaaatgtaaggtttttgccttttatatttaccattgaggaaaaaggtattcattcatataatttagattaagtaaattgtatacgctttcaatatacagaattatttttcaataattctctggagaaagagtcatgagcgtctacaaaaaaacttgccacactaggagacgagattataggaggggtattcattgaaacgttggtttagtttaatcagttttgcactcattttaaccctagtacttgcaggatgcggaggaaagtccgctaatgaaacaagtggtagcggtgaaaaagaagttgttgcatgggcttggaatattaacgtaccggtattaaagaaagcagcagcagaataccaaaaagagaatccagggtttaaattaaaagtagtggatatgggacgtgaagatgtttattcaaaactaacaacaggattgcaagctggcggaaaaggccttcctgatattgtattagtagaagacgatcgtttccaaggatatttagatgcatttccaaaagcatttttaaacctatctaaaaaaggatttgataagcaagaagataagtttcctgagtttaagagagcccttttatcaaagaatggagatatgtacggcttcccgtttgatgcaggtccaacaggcgtattctatcgcacagattactttgaaaaagcaggcgtagatccaaacagtatcaaaacatgggatgattacattgcagctggtaagaaaattaaagaaaaagttggcgttgatttactaggtttagattttaataatgacgatggcttattccgaatgacgctgacacagcaaggtacgttctattttaataacaaaggaaagctaaatttaacttctaaagaagcgaaaaaagcaatggagttaaataagaagttaaaagaagcaggcattgttaaaaatacagtgggctgggatgcttcaatcagtgccttagcagaaggtaaagtagcaagttcaccatctggtgcttggctatccggttctattacacagcaggctccggatttaaaaggaaaatggggagtgtttttattaccttcgtttgaagaaggaggcaaccgtgcttctaacttaggtggaagcaactatgtgatttcagcaactagtcaaaaagcagatgaagcgtacaaatttatggagtatttctcaacaacggataaaattcaagaagaagcgatgaagggcggattattcccatcattaaataccgtatactcttcaaaattattcactgcacaagatgagtactttaacaatcagacgatttggaaaacattcgcagatgaaatgaaagatattaagccggttaattttacgggcaattactcagttgcaaacagtgaagcagtcaaagctgtgtcagaagtaacaaatggtaagggcgttacagactcgcttgaagcagcccaaaaacgcttagaaaaccgaattaaaaaataatcaagaagcatagaaggtgatttatggaaaattgccttctatctcttcttcttgcggtactaggaggtcatcatgaagacaaataaatcgttgccttacttatttattgctccagcacttttgctgttcgcgctgtttacaatctatcctattttttcatcgtttgttctaagctttcagagtatggaaggcggaaagtatgtatttaccgggttatcaaactatacacgcttactaggagatgatattttctggaaagcgcttggaaatacgggaattattttaatcgttcaagtacccgttatgattttattagcgcttgtactagctaacgcgttaaacagtcagcttttaagactaaaaggttttttccgagtttcatttttcttgccggcagtaacgtcactagttgcctactctattttgttttcaatcattcttcaagatgaaggaattatgaatactattttagggtttttcggtatcgatgccattcggtggctgggggatccattttgggctaaagtctcaatcatcgttgcgatgacttggagatggacaggttataacatggttatttttctagcagctcttcaaagtttatctcatgaagtttacgaagcagctgatttagacggagcaaatcgtattcaaaagtttttccacgtaacggttccacaattaaaacccgttatcttgtttgctactattttatcaacaattggcacgcttcaattgtttgacgaaccttttaacttaacaaaaggcggccctgctgattcaacgatgacgctaggcttatatatttatcaaaatggctttaaatattttgattttggatatgcttcagctattgcgtacgttgttgtattattagttggtattttaacgttcttccaatttaaatttacgggtgataaatcatgagtgtattagagagagtagaagcaaccgcagtagttaccgttcctaaggtcaaaaagaaaaggcacatcatgcgcaaaataggactatacagcttgcttgggctgtttacgattatctcaatttttcctttttactggatgtttatcggcgctacgaatgaatcaggaaaaatgtttacaaaccctccaacgctgaagcctggcgatcaatttatgacaaatctacaaaatttaaatgcttcaattgatttagggcgcgtcttttttaactcagtatttgtttcagtcgtgtatgtgattgtagctttaatggtctgctccacagctgcatatgcgttatctaaatttgaattcaaaggccgcaacgcaattttcactacgcttttattgtctatgatgattccatatcaagcaacgctcattccactttttcagctgatgtcgaattttaatttgcttgatacgtattttgcacttattgttccgcagctgtgctttccgtttgctatctttttattacgtcagaactttttagcttttccaacggaacttattgaagcagctcgtttggacggagctggagagatgagaatctttttaactattgtgcttccttctatgaagcctgctatggctgcagcagctattttcttatttatgacacagtggaataactttatgtggcctttagttgcgactacatctaacgaaatggctacattgccagttgctctttcaagcttaattggcttatcgattattgattacggtcaagtaatgatgggagtaacgattgcaaccattccaatcattgtcttcttcctagcacttcagcgtcattttatttccggaatgcttggaagtgcagtaaaataaaaagcagcagatgttgaaaaaaagtatgttagttaaaggaggatccgaacgaatcttattgttgattgagaatcaaattcgttcggattttttcctttctaggatgaacgtagatttaattgtagttaattgcttctaggtgttgattggagggcaagacgaagactcctgcgggaaaagcggaacaggtgagaccccgcaaggagcgtaagcgacgaggaggctcaccggccgcccgcggaaagcgaagtcttgcacggaaatcaacagctgtgtaataagtaattcatactagttcaattattcaatttgttcgtctttagattgggttgatttagccatagttcaatcactttcttaatgaacagggggagagaaaatgggagaaatacctgtaggagttcagctttatacgctgcgtgaagaaacgaaaaaagattttaaaggaacgcttcaaaaagtagctgctttagggtatcaaggggtagagtttgcggggtacgaaggatatacagcgcaagaagtaagagcatggttaacggatttacagctgaaggcagcttctagtcacgtgccgcttgaacaattagaatcaaatttagagcaggtgattcactttgagcagcaagttggaaattcacatattgtttgtccttatttaatgcctgaacgacaaactgaaaaaggatatttcgaacttattgattctttaaattacattgatgcttattgtaaaaaagaaggcctgtcgtttagctatcatcatcatgattttgagctaaagaaattgtcaactggaaagtcagctctccaaacaatcttagaagaaactgaggtaaacgtagagttggacatttattggctgactaaagcaggcgaagatccagtggagtggatgaagcattatcaaaatcgtacgccttttattcatttaaaagatatgacaacagacggcgaacaattttttgctcctcttggtaccggaggagtagatataaaggctgtaatgcaagaaggacatagagcaggcgtaaaatggtggatcgttgaacaagatcattgtatagaaagtcctcttagcagcattaaaaaaagcttagcatatatcaaataaaaaaacgaacagacagcgtctgttcgtttttttattgataagctaagctggagtccactcaatttctccgcacttattcgtataatcaatattcacctcaaagttatgtttttcataaaaatgaatcaatctttcgagatgatcccaatcgcgctcagcgatatcgcctttaatgacatgaacattttgatcaaccgctacttcttttaaataattcatacatacagagccatatcccttattagcgggccctttaatgtcaccaataaaaatcgtgtgattatcttcatatacgccatcgatggcaaaatcccaagcccctctataggcttttgtacattcatttagcataattttacatgcgtttccgtcattttgtgccgatacaataactaactgattatcttcaggctgatcgacaccaataacttcatactttttagcaatttcttttaaattatcctgcatgcgaaatagctgaaactctagatcatcaagtgtttcttttagttcttctgcattctgatttttttctgtaagctgagtaaacattttatactcctttccgtctgttttcggtctaagtgcgcctatgacaaagaggacacggtgtataaagcgaaactttatttagcaaagtatctaccttagtaaaaatataaaaaggaaagaacctgatttgattgattattcatcaaaacggctgctttccttagcattcacttttaaatttttcacaacgtgtataagggtaacaaagactcattaattttgtcaataaggttgtaggtctatttataaagaagataacaggtcattgtatctattgggaagaaaaaataatgagtgaaaaaagaatcattttaaagtaaaatcatcggaggaaaagtatggttaaaaaggaattgcttttcattttaaaaaaacatacttaaaataaaagtaagaaaatatttcatttacttacaaaatattataaaaaatggatggagtaatatggggtaaatgttaactatatcgaacaaagggtgtataagatggataaatatcaaattgcattattagctaatgtgcgtaagcagctgcaagagtggaccgatcaaaatgaagaaatacctcatgaagaagtgtaccgctttttgcattcaatttctggaacgtctgcaaccattggactgaattatttaggagatcgttcccgcgagttaatggaagctgttgaaaaaaatcagaaaaaaacctgggattacgcggagttgaatacatttttattagatattattaaaatttgttatcaagatgaaattcaatccgcagaagatataaataaaccgatagaaattagtgaacaaacagcgaatgttttacttgtggatgatgatctttcaatgctgatgtatttaaaagaacagtttgaaaaacaaggttggtacgtattagcaactgcctctaaagaaaaagccattacggctttttacgaattaaagccggattgttttgttgttgatgtacatatgaaagactgtacaggctttgacattctgtcatttttacgtgataaaacaaagcaactgttcgtccccattgtcatgatgagcgttgataatcaaagagagacgcgtttgaaggcttttaaattaggggccgatgatttttttgttaaacctctcgatatggaagaaagtctgcttcgaattggtcaccatattgaacgaaagcagatgtttaactcctatttaatgtttgatgaattaacaggagcctataaccgaacgtatttaaaagaaatctacagtcagcagctatccagctacgaccgtttaaaagatcctttttgtttagcgattttagatttagatttctttaagagaataaatgatcgatatggacatcttatgggagaccgcgtgctgcaagcatttgtagagtatatgaagcatgaaattcgtccaacagatcacatttttagatatggaggcgaagaatttattcttttactgccaaaaaccaatataaaagaggcagaaacagtattaaatagactgttggattcctttgtgaaaaaagtgttcacacatcaaagcacttcgttttattgcagcttttccggcggagttgtagaagttcataacactgaatggccgttagaaaaagctcttcatcaagctgatgaggcattatatatagcgaaggaatcaggacgtcaaaaaattgtagcttcttctgaaagcaagctggttaaaaagcgaacgcttcgtatggctattattgatgatgattctatcattcgaacgatgctgaaagagcttttaagtaagattgatgtaggagatcgctatgaagtgaaaatagaagtgtttaaagatggcatcgaattctttgagtcccaatggattcattctagcgatcagtactttgttattttagacggaatgatgcctaaaatggatggcttagaagtgctgcaaaaattaagacagaataaacgtcacgatcagtatacggttattatgcttacatcaagaaacagcgaacaagatattcaaagagcattagaacttggggcagacgattacatgacaaagccatttaagttaatggagcttgaagcgcgcgtgcgtcatttaatgaagaaggtgaaataaatggcgatgtcaattcaagtggtatatatcttatttggcgggttgctattgcttttagtctgttttctgagttatttacttattcaaaaagcgcgtttaaacgcttttcgagcaaaagtagaatcctataaagatagtatgaaagaatctctttttatttatttatacagaaaagatgaagaacatcgggtagagcctaaaaatagaatagagctggcgggtgtagaggaactattgagcggtttttctgcagctgtacaaggcgatgaaattctaaataacattacgctctatgcggagaaggtgtttacacccaaatataaaaaagagctgcatcattctagatggagtgtcagaatgaatgccctttatgctattgaagattttgggctaactacgctaacagaccaattagtacaaatatatgagaaaaaaaatagtacagcggctgaaaaaaatcaaattttaaaaattttagttaagctgaatcgccctgagtttgttatgtacatgacaaacgcttctagaccgctgtctgaattcatgtaccgctctttgtttggaactatgaacagtgagcagtttcagcaatttattaataaatttgaagacctgcaagaagaaattcagctgcctcttatcgatatgatcggtatcaatcataagttaaagtatatagatttcttaaaaatgcacatgaaaagttcatcagaagaactgcgaattcgttcattgaaatcacttaatgctttatcttttccattaagaatagaagagctcacgaaccatcttcagtcaggtatttggcaagaaagaatgatggctacaaaactaataggcaaaacgagagatgagaagggattgtcacttcttgagcagtctctaaaagattctcattttcttgtgcgttcaaatgctgctcagtcaatgatgaaaatcccaacaggtaaagaatacttagttcaagtatacaaaacgactgatgacaagttttcgaaagatatggcagcagaatggcttgaaaaaggaggaattacggttgtggaatagtgtttggcatcttttattgtccatttgtggatgggctgtatttgcttatatgatttttgtgctttgtttttattttacgatgtttatcatctcggcttttcaactgcgaaagcaatatcaattaaatgatgaagaaccttatgaagatttgcttgcggtcagctatacaacgccgttatctatattagttcccgcttataacgaatctgtcgggattattggaagcgtgcgttcgctgcttggaattgaatatccggaatatgaagtaattgtagtaaacgacggatcttcagatgatacgttagaaaagctaatcgaggagttttctcttgtgaaaatgaatcgagttgtgagaaagcaagtagagacgaaagaagtaaaagctgtatatcgttctaaattatacgattatttatatgtagtcgataaacaaaatgggggaaaatcagatgcattaaatgcaggaattaatttatccaactatccttatttttgttcgatcgatggcgattcagtgttagaaagagatgcttttttaaaagttatgaagccaattattgattcagacggagaagtaattgcttcagggggaagtattcgaattgcaaacggatgtaaaatcgaaaacggtgcggtcgtatcgattggacttgatacgcagccgcttgttgtgatgcagattattgaatatttacgtgcctttcttatggggcgcattggtctcagtcgccataatttattgcttattgtgtcaggagcatttggcgtattttctaaacgctgggtgattgaagctgggggttattctcatacagtcggcgaagacatggagctcgttgttcgcctgcaccgactgattaaacagaaaaaaaccagcaatcaaattgtttatattccagatcccgtatgctggacagaagcacccgatgaaatcaaatatttgcgaagacagcggaaccgctggcaccgtggtttatttgatagtctttggaagcataaagagatgctgtttaatccgaaatacggaagcatcggaatgatttctatgccttattttgtgtttattgaactaatcgggccggtcatggaaatgttaggctatttgtttattgttatttctctagttgtaggcgggatttatgtagaatttgcttatttgctttttcttttaatggttgtatatggttctctttattcaatggcggccgttttgctagaagagtggagccttcgtaaatatccaaaagtatccgatattgctaagctatttttcttttccctgactgaatccttttggtatcgccctctaactgttatatggcgctgtcatggattgttggatgttattcgcaataaaaaaggctggggagacatgcagcgaaaaggagtttcacaatgaaaaaatggttattaatcggcggcattattttggttatgggaataacggcttctccatttcttatttggcagctaaagaaaccagctgatttgaatatgcttgtcattgataaaacagtgccagatcaaacgtttcgagagcatcaaggcttaatgtggatgctgaatcaagcgaaagtacgcaaagacgggaagccttatgaaatctcaaaagattatgcagggttttacccgaaaggagataaaacatacagcattaaatctctgccaaaaacaaactctgcagatatgatttatatcaccgacacgtatggtgtatacaaagaagatttaggcgtaaaagctaaaagaggagatcgctctcaattggtgtatggcggcatgacttctgaagacgtgagctacgttaagaaagtgctgaatggacgtacaaaaacgctgattggagagtttaatacatttggaagtcctacttccttagacgttcgcaaagaactgtatgaattgtacaatgttacgtggtccggctggattggtcgctactttgaggaattcggcagtgaagaagttcctgcttgggtgaaaagtggttacaaaaagcagtacaacaaagagtggagccttacaggaaaaggcttattattcgttaatgaatccaataagctcgttattataacggaaaaagaattaaaagaaaatccagtatggtttcaatatacaaaacaaggaaagaaaacattgaatttacaggatgaatctgcttatcaatattggtttgacgtaattacaccccagcaaaaaagtgatgtgcaggctcagtttgtctttcacttggattctgaaggaaaaaacaagctaaaggaaaatggtatccctttgtccataccagcagtcgttcatcataataaagagcgatatgatacttattactttgcaggagattttgcagatcaaggagaagtaccttccatttatcaaacctctttttacccggtgtggaagaaatggacagagaaaatcggaaaagaagatgagtcttctttttactggactgtttatctgcctcttatgaataagatcatagatcaccagcaaaatgaatctcagcctgcttctgttacttttaataaaaatatggaaatctatgaagatgctgaccttaaagtagcagggaaagtaggaaaagaatatttgcaagtttatcaaaatggcaagtggcaagatttgctgattaaaggagtaaatatgggcattagtaagccaggacatttccccggtgagactgctatttcgaaagaagaatatttgcgctggtttaaagaaatcggaaagatgaatgcaaactcaatccgcgtatacaccattcatcctcccgccttttatgaagcgcttgctgagtataatcaaaaagccaaagaacccatttatctttttcatggagtatgggtgaatgaagaagttttctatgattcacaagatgcttttgcaaaggaaaatacaaaagaatttgaagctgaaatgaaaaggattgtaaacgttattcatggaaaggcaacactgccaaaacggacgggacatgctagcggaacgtatacagcagacgtttctccttatgttttgggctggattataggagttgaatgggatcccacggtagctctttcgacaaatgaaaaacataaaggaatgaaagattttaaagggcagtatatctataccgaaaaaggcaacccctttgaaatttggcttgctcagcttatggaaaaaacaatttcctatgagcaggataaatatgattggcagcggcctatgagctttacaaactgggtgacgacggatttgctgactcatccatatgagccttctgaagacgaagataaagtgtctgttaatcctaatttaattcacacaactaaaaaatttgagccgggattatttgcctcttatcatatttatccgtactatcctgatttcttaaactatgaacctcgttatctcgcttatcaagatcatcgaggagagaaaaataactatgcaggctatttgcaaaatatgaaagaagttcatcatatgcccgttcttgttgctgaatttggcattccggcttcgcgaggactcactcatagaaacgtatacgggtgggatcaaggctttcacacggaacaagaacaaggaaagattctgtcacgcttatatgaagacattgtcgaagaaaaaatggctggcggtatggtctttacatggcaagatgaatggtttaagcgaacgtggaatacgatggagtacgacaatccgaaccgaaggccattttggacgaatttgcaaacgggagagcagcattttggactgctgagttttgatccgggaacgaagctgaaagtcaaagtagacggtaaatcagatgattggaaaaagctgaacagcaagtcggtatataagccgtctaagaagttaaaagcattgaacattacaagtgatgaaggttacttatacctacacgtgagtgcaaaagaactggaaaatcaaaagctttatttcttgtttaacacgattaacaatcagggacagtcaaagattcctcaaattccttccttaaaaacaaaaggaattgattttgtagcagaattaaacgggaaagaagacagtcatttatggatagacagctattacgatacgtattatttttcatatgctcatcagcttcaaatgattccggccgtaaaaggaagcgatacaaaagacaacggcatggttaatccaatcaggctcgcccttaacaaagagttagcgattggagaggggaaaaacaagagaaccattccttttgacgcctatgaaactggtaagctccaagaaggaaacagcgatcctaattcttcttcatttgattcgctagcagattttaaagtgaatgaatcaagtggaattgctgaacttcgcattccttgggcgcttttaaatgtaaaagacccgagtcaaaaagaaataatgggagatatttggtccaaaaaaggattagaatccagcgagaaaataaaaggaattcaagtgggagtcgtagctattaataagaagagcaatgacgtggaagatacgtttccgactcagaaaaaaggagaacttttattaaaagatttttacttatacaagtggaaaaattgggagtatccaacttttcacgaacgaataaagccgtcctacttcatattgcaaaaaacgtatggacgactacaagcggaggaataacattggcaaaaattttattagcggaagatgaagaagtgcttcgtatgttagtggtagatacccttgaagatgaaggacatgatgtgacggaagcagaaaatggcgaagaagctttggaatttattaaagaacgtgattttgacttaattattttggattatatgatgcccgtgttcaccgggcttgaagtcattcagcagctgaaagaaatgaaagataagcgccatacaaaagtattgatgctttcagctaagaatcaagctgctgatcaaagccgggtgttagaagcaggggctgcgtattttatgtctaaaccgtttagtcccctattgctagccgaacgtatcgaggaaattttagatgaacaataaactaaaacgaaaaagtatttcaacccagttcatcctcttagcaagtatccttttacttgcttttgcggcgggttcaactgtacttgtcgtacgacaaaaagaaattacagctgattatgctcagtacagggcacaagtgcgggaaaagacacagctgctatctacaattgataaatcaatgaacaaggcttttttgcaggctcgtgggtttattgcatttgattcagaggatatgtataacgaggctgcaagtcagcaaaaaattatcgaagaaaattttgctcgactttcaggtctagccgcagatagacgtgagcgtacgtttgtaaatgaagcgacggtaatgctaaacacgtattttaatcaaacgcttccttattttaaagatatttacgacaaaaaaggtattgaaggagtccgctctagtcctgagcggaatgctgcttctaaatcaatagaacaaatgcaaaaagaacttgatgactaccaaaatgaattaactaaagacttaaatacacagtacgatgatacgtcgagtgacatgcagaaaagtcaaacgctctttattttatttttagcgtttacagtggtcattttattattgcttacacggatactgctaaataagtttgtaaagccactgagtcagctagcatatacggcaagcgaaattgctgccggaaaagaaatgcctatgatatttgatgaacatagaagagatgaaattggtatgctatctcaagccttttacaaaatggtatcgactttgcaaaataatgaacaggagttaacggctcaaaatgaggagctgattgcacagcaagatgaattgcacagtcagcaagatgaacttcagcacgcattagaattgaccaaggaacgagaaggagagttggaattgcgcaatttatttgtgcatggactaacaaattctcttcacaagcaagaggttctcaagagtgctgtcacaaacatgagccgggtgatgaaagctgatcacgggtttattatgctagccgatgaaaagacacatgcttcatttggtctatcttcatcaagtgttcaacagatggtggcaaatcctcataataattacgttgatcatgtgcaaaagacaaaaaaatgtatggtaataaaaagagagtgtatagaacatgagcgcctatatcatcagcaaacgttttatttgtatgatgttatcgtaccggtgctgtcttcacagggagatatgctagcctatatgttttacagtcgctatgcggatgggtacacagagcatgaactacagacatttgaaatactggccaaacaaatcacaattgctcttgaaaaaatttatatttacgaagagtctgagcacgaccgactgctatctcaagatattttaaattcgattcaagaaggaatgcagcttgtagatacaagcggtacgattctacaagtgaatacgaagattagcgaattgtttcaatatgagcatcaaagcgggcttcttcagctctctctcgatcaatggctagatgctctctctcaaaaagtcgaaaatatagggcagctaagacaatacgttgaagctatttgtaagggagagcaagtagaaaagtcttttatttattacctgcacacggaaggtaagcgaaaagttataaaagtttatagcgaatacgtgtatcgaaaccgtcagatgtttggcgtattgttcgttcatcgtgatattacgaaagaatttgaagttgatcagatgaagtcggaatttgtaagcactgtgagtcacgagctgcgcacacctttagcaagtgtattagggttcactgagcttatgctaaacaaaacattaaaagaagaaagacaaaagaagtatttaactactatttatcaggaagcacagcggttaacttctttaatcaacgattttctggacgtccaaagaatggaagcggggaaacaaacctacgataaaaagtatcaagacattcttccgcttattaagcaggtgattgaagtccagaaaatacaaacaagtaagcatgaatttgatatgatttccgatcaagagcattttacagtaatgggagataaagataagctgctgcaattgtttaataatgtaattagcaatgcagtgaaatattcgcccgatggagggaacgttacagttaaagtgtatcaaaaggaacacgctgtttatattgatattcaagatgaaggaattggtataccaaataaagcgctaggtcaattgtttaccaagttctacagagtagataactccgatatgcgcaaaattggcggaacgggtctaggattagcaattgtaaaagaaattgtaaaagctcatggcggagacattactgtacaatcggaatggaaaaaaggaacaacattcacggttgttctgcctcttctatatgaagttcagtacgacgaagagatgataagtgcgaatgataaccgtaaaagcgtagtgattgtagaagatgataaaagtttagcgacgcttttacaggtagaattaaaagaaagcggttttcatgttcggtattttaacaacggagaagacgcattaaactctattcatcagcaaaagcctgaagtggttgttctagatattatgttaggagaaaataagttagacgggtgggatgttttaagacacctcaaagaaaatatagagacagaaaaaattcctatcttaatctcatctgctttagacgaaagaagcaaagggttagagcttggagtgtgtgagtttctgattaaaccttatcagcctagtaaattatccaaaacgattctccagctgcttttgaaaaaacaagagcacgaaggagaaattatgattccatcagataaagaagagtagaaatttggtgaggcttcgttatatttacggagtctcattaaacgaaaagaaaattagtaaagtaataaaaaaacgttgaaaacgctatcaatttgtggttttatagtaagtaggcataacatgatgaccttagaattacctttttccacctccttacatgcgtaaggaggcttttttgtataaatatagtaagataagataacaaaacctgatgcagaatcgtttattgaatttcagctagttaagaaactgctcaagaaagtttgatagtgaaaggagtgaagctctggaaatcattttaccaagggaggatagtctatcccagaagtgaaggtagttcaatttttataatcatagtataataaaaaatacggttataaaagctgtgtttattatacatcttttatatagaaggtaaggttgaattttatattttcttaaaggaggtctttccttggatattgcgtatataattgctgaagaaagaattagacaagcaataaaagacggtgactttgataagctgcctggggaaggaaaaccattaaagttagaagatttgtcacatatacctgaagaactgcgccaagcgtataggatattaaaaaatgcaaacatgataacggatgaacaagagctgaaacgagatatagctacaatagaagaattgatttctatatgcacggatgctaatgaagaacaaaggctaacagagatgcttacggaaaagcgtttgcgctttgagcagctcgttggcaagaaaaagatgacaagttctgcagcttacaggacgtatcagaataaaatttactccaaatttttttattaatgagtgtaatggaccagacgatcggagggtgagaacttgcggctgttaattttattgatcagtatcatactatttatttcgctttgtttttatatttttgctccacaaataaaacgaggtgcccaatcgaaaaatgtgccggttttatttattcatggctatttaggcagtcaaaaaagcttagggaaaatgattaaacgatttgaacaaaacggatggggaactaaagtaggttactgcgttgttcaaaaagatggagctattcagtggaagcatattatgaaagcaaaagagggaaaacttccgcttattcatatcgtctttaaaaagccagatgccagtattgcacagcagcaaaaatggattgaagctattatgcaagatgtacgtgatacatataaagcaccttctgttgatttagttggacatagtatgggaggagtaacagcagcagctgttagtttgtctaaccctcagcatattcaaaagttagttacgttaggatcgccaattcaaggattagattatcaggaattaatggagatgtatcctcatgcacgcaatcatattgaatctatgggtgctcgtgatttagcttttcactctatagcgttaaacaagctttatgaaagtcgtcaagatttctcaaaagaaatcgacgttttttcaggagcaggagatgtgggagataagacagatggagtggtaacagtagaaagtgcgtacggactgcaagagttcaccgaacacattcatctccaaacgtttcatgaagcacattcagatttacatgaaagctcagaggttgataaagctgtctatcaatttttaaaacgggattaaagggggattacgatgctttacttaattagacacggccaaacagattggaataaaaacaaacttattcaagggcatgctgatattccgctcaacgaagcgggaaagcaacaagctaaacgcgtagcggaacgttttcgagatatccatattgatgtaatctatacaagcgatttgcttcgtgcgcaggagacggctagggaaattgcagcagctgctaaagtagaaaaaattgaagtttgtgagcagctgcgtgagcgctcttttggagaactagaatcaaagaacgtagaagttttgcatgagcttgtgccaaactatgtaacaaattggggagaagaacctttatataatatcgaaacactcgaagccgctcaagaacggatggttcggcggttaacggaaattatgaagaagtctatcggaaagaaagtagcagttgttagtcacggggcggcaattaatacattcattcatcatgtaacaagcggagaacaaggaacggggactactattttacaaaatacatcgattacaacttttgcttatgaaagtgggaaatggcgtcttgaaacgatcaatgatgccaaacatcttgaataaatatacttaaagaggctgtggcagtagtattttagttgagggaaaatccgaacgattaatcgttcggatttttttatggtgatggtgaacgtagctttcatatatgtaagtacttctagctgttgattggagggaaaggcgaaggctcctgcgggaaaagcggaagggatgagaccccgcatattaattttatatataaatatttatacaattgattttaataaaaatgcatagtaaaataagctttattactattctattaaagcgtttagtataactgaatttcctaatattgtttaataagtaactatatttcggaataagattaattgatttgtataatttcaaggaggatgtagtatgtcaaaagattggagtcacttatttgaaagaatgcctgaattgctagcaccgacgatggctaaagaccatccgaatttgcccgttgtgaaagaagaaggatgctattattatggattggatggtaaagaatatctcgattttacttctggaatcgctacgacaaatgtaggacacagacatccgaaagtagtaaaagcaatcaaagacggagcagatcaattattgcacggtccttcaggtgttattatgtacgaatcgatattaaagttagcggatgagttaggaaaagtaacgccgggcaatttagactgctttttctttggaaatagtggcaccgaagcaattgaaggagccttgaaattagcgagacatgtcacaaagcgtccgtatgttatttcttttttaggatgttttcatggccgctcgatgggagctttaagtgttacaacctcgaaaagcaaatatagacaatttcagcagccttcgggactgacgtatcaaattccatatgccaatccaaaagagtgccctgcggagctagacagcgatgtgtactttcctgaaaagcttgaaaaagattttgaaatactctttaagcaccaagtcacgcctgaagaagtggcggccgttattttggaaccagtattaggagaaggcggctatattattcctccgaaaagttggatgaagaaattaagagagatttgtgatcgtcatggaatattacttattttcgatgaagtccaaacagggtttggccgtaccggcgaatggtttgctggacaaacgtttgatgtcgtgccagatattatggctatagcaaaaggaattgcttctggaattccgcttagtgcaacggtagcttctcaagaattaatgaagcagtggccccttggcacacatagtacaacatttggaggaaatcctattggatgttcagcagcccttgcaactcttgaagtgatgaaagaagaacaactgcttgataacacaagaaaaatgggcgcttatgcgttagaaaagctgcatcttttaaaggccaaacattcagttattggggatatccgtggtttagggcttatgattggaattgaaattgttaatccggatacgggagaaggagatggagacgccttatttgagattctggacttagctttagaaaaaggcgtgttattttatttttgcggaaatgcaagtgaagttattcgtatggtacctccgcttactgtaacaaaagaacagatagatgccggcattcgtatgctagatgaggctattacttcttttgagaaaaagtcagctgtaaaagcgtgataaaaaaatataaaaaatttatatatttgtaacctagttgtcatagtaatggtagcgatatcatagttttagagggaaaacaattttctgaaaagtagttgacatctgtttgtgcagcatgtaacataatatttatcttatcaacaattatcaacaaaattcgacaaacttcttatcaagagaggtggagggataggccctttgaaacctcggcaacggactttatagaaccgtgctaactcccacaagcagtgcttgaaagataagaagagaccaggcttactaacaattgtgatcccaacctcttcttacaggcacttagacactgtaagtggaggttttaattttatgacaagaagatgacatttagataaaaaacagcaggtgaaattacctgctgtttttatatgctgtaaaatgataaataacctaccagaattcctagtgaaagtactccaattgtaataccaacaatccaccacatcatttttttcattatttattcctctttatcaattaactatagctgttgatccgcctgaagcgccggaagctgtaccgtaagcagtttgtcttttaattccggcatttttagctgcaattttccactgccagtcaatttgcccgtaggctcgattattttgcacccaagattttgaactcttttttgaaatagacacaagggggtttacatttttcgtgacgacgcctcgtacacttttgactgaagtcaccgatgagtttttcgtgtaatagtctacatacaccgttagttttgttgttgtaaatccagccgctttataagaagccgtataagctgctgttttgaataaaggtgaagccgttcttgctccgtatgctgctgtacttgcagcttcgaccgtgccgctagtctcttcaatatccatttttaacagagatggatcctttagtgattgtacaactttttgtttttgctgacgcgacagttttgaaaattcatacagtgaacttttatcactttgcgctttcaagaactgcgtgtaagaagcaaccgttaaatgtgcaggtttttcactagccataacagagtttggcacgactaatagacataataacgcacttatcaggaaaaaagaaaaaaacgttctgtttgtagccatatttatataaatcctttctagtattctatctttataaatagatacgaagtaatttatcgttttgaagaaggactgtgtgctgacatattaactgtcatcacgacacgagcttgctgtacagatttcataaaacattcgtatagagaagcgaatactttgtccacatctccttctaaagctgttgcaaaaggcacggtttcagcaaatactccctgttgtttaactgcgccaattccgcttttgatgatgtctacataatgcggcgtatctaatggatacaaagaaaattgagtggatacagggaacgaagcacaaagctgttggtttgaagacgtgttttcttttggttttatttttgtttcttcgaaatattcttcgtgctgccctgttgaaaacgtggcattcagcacaatatgctttcctgattttccagcacttttataaacggcttgcacaacttcaaatacatctttggcagttccttcaataaacgtactaacacggtccgtttttcgctgaactttagacatatccacttcgtttaatgcgcctaaaataatatcgataaagttatcactcataacggaaagcgtaaaacggcagccaacatttattttttccaagttaatcacctctaaaatatagatttgtagttttttaatcatacaaatcataaaataacttttctgttttgtatagaaacagaagatagattctttatttttaggaaatattacatagaagaaacggaaataaattgcataacatgaaaaataagggtgttaagaaaagtcacataataaaaaagaataaaaaaacaatgttagaacttctgacaaaaagctggtatatagactgaaaacaccatattataaatacaagatcacattattctcctgcgatttcgtataacctcttgaaaaagggacttgggattttatcataaatccaacctcctagctgtataatcagctaggaattttttttacccaaactctctatcgcccatgaggttacctacacttattcaactcagagcatacaccatatatataagaccagtgtaagaaagattgcttgaagatgttagtgttcggcttgagctagaaatagatagatgttacgaaagaggggaaagaaggtatgacgcacacattaattaaaaatgcagagattattacgatgaatgagaagaatgatattatttacggtgacctttatattgttggaaatcgtattgcagccatcgggaaaaacctgcatccggaaaaggtagataaagtcattgacgcagcaaataaaacgattgtgccgggctttatacatactcatattcatttgtgtcaaacgctttttagagggcaagcagatgatttagagctgctagactggttaaagaagaaaatatggccgcttgaagcttcacatgatgaagaatctatctattattcagcactgttagggatcggcgaactcattcaaagcggaactacaacaattgtagatatggaaactgttcatcatacggactctgcttttcaagctatatctcaaagtggaatccgagctcttgcaggaaaagtaatgatggataaaaaaggcgatgatctgccaaaagctctgcaggagacaacggctgactcgatcaaagaaagtgtagagctgcttgaaaaatggcataattcaaataacggtcgtattcgatacgcattctccccaagatttgtgctgtcgtgtacggaagatttgctgcgtgaagtgagccatttatcagctggatataatgtccatgtacatactcatgcttctgagaatcaagaagaaattcgcatcgtagaagctgaaacgggtatgagaaatatcatgtacttagatcatttaggattagccaatgaacgccttattttagcgcactgtgtgtggctaaatgatcaagaaaagcaaattattaagaatcaaggagtaaaagttagtcattgcccaggctcaaacttaaaacttgcatcgggaatcgcagatgtgcccggtttattagagcaaggtgtatttttaagtcttggcgctgacggtgctccttgtaataataatttggatatgttcaacgaaatgaggctggccgctacgattcataaaccctcgcacggaccaacggccatgaatgcaaagcacgtgctagaaatggctacaatcggcggagcgaaagcagtcgggcttgaaaaagaaattggaagtttagaggttgggaaaaaagcggatcttgctattttaaatttaaatcagcttcatacttttccatcttacggcgtagaccctatttccagagttgtgtattcagcaacgcgaggagatgtagaattaacgatggttgatggagaaattgtgatggaaaaccgcgtgttaaaaaccattgaccaaggaattgtgctgaaagaagcaaatcattcgattgatcgtcttttaaaaagaatcccgcttttgatttcataagatgtaaaacaaagaagaggctggaataaaagtattttaacaaaagtaaaaatcgaattattaatcggagttattgattaataattcgattttttgttgtcaaggtgaacgtaggtttcatctgtttagttgcttctagctgttgattggcggacaaggcgtagactcctgagggaaaagcggaaggaatgagaccccggcaggagcataggcgacaaggaggctcatccccccgccctcggaaagcgaagccttgcacgaagatcaacagcggtgtcacaagcagtccagatcatttatccaatttgttcgtctttaaatgggatttatttagtgatgtcttaatctcttttttgtatatatgagtaaaaagagtactcttgcaacagactaaaaagataagagaaataaattttcaaaattccaaactaacggaagataaaaatttttataatgatagcgttttctacctttgcatatctacaaattaagactataataggacaaaagattttactttgcaacgtaaaatcctcctaaatcgtgtcttttttaggacatttgaataggtaggattttttattttttttagaagtagggaggcgcgcgtgttggagcgtaacggaatattagagcgcttgtttaaactatcagagcgcaacacaacaccaaaacaagaaatactagcaggacttacaacttttatgacggtcagttatatggtaattgtcaaccccattatcatgtctgacgctggtatcccccgagaagcggctcttgcagctaccatttacgccattgtatttagtacgttactgatggctctgtgggcaaatttcccgattgtaaccggtccagggatgggtttaaatgcgttttttacgtattcagtagtattaggacaaggattgtcatggcaaacggcacttggagcagtttttatatccggggtcttattttttgttttaacggtaacaggaatacgcggaaagattattgatgccattccgaacgtattaaagtcttccatagcagttggaattggtctttttgttgcgtttatcggtttgaaaaacgctggattagttgtggcaaacgagtctacttttgtagggcttggaaatgtcatggataagggtcccttactggctatttttgggctgatattagcagctgtactgatggctaaaaatgtaaaaggcgctctcattataagtatttttgctacgacaatattagcgatgattgtaggagtacaagcagttcctcattccttgaaagacgtcttttcagctacgccgccgagcgttggagaaacattttttcaaatggatttaaagggtgcagttgcctacggcattttttcagttgtattttctttcaccatcgtagaattatttgatacactagcgacattgattggactatctaaaaaagcaaacttagtagataaaaacggtaaaattccaggtttaaatcgcgcgcttgcagcagattcaatcggtacaatggcgagtgctatttttggaagcactgcgttaaatacgtatattgaaaatgcaacaggtattgcagaaggagggcgtaccggcttaaaggcattaacggttgccatcttatttatatttactttgttttttgcaccgcttattcaatttatcccgagcgttgctactgctccagcactcattattattggttcgcttatgctaagtgacattcgaaacgttaacttcgacgactttactgaagttgttcccgctttcttaacaattgtcatgatgccgttaacctacagcattgcagaaggtttagcgttcggcttcatttcatacacagcgattaaactgtttacaggacgtcatcgcgaaattcattggatgatgtatgtgatcacgattgccttttttatcaatttttatatgagttcgcattaggaagaaaagacgtagccccacgctgcgtctttttttgttactgattccttgtcagagaacatcgtgaaaggatgaagcttttcttttattttagataattgtaaaataattataaaaggtgcgttataaagggttggtggaataaattgaaacaaagtaaacgcaaacgtgtaaccttacaacaagtggcagaacacgcgggagtatctcgagctaccgcttcgcttattgtgcgaaatagtccaagtgtttctgaaaaaacaaggaaaaaagttctagcttcgatgaaagagttaggatatgtatatgaccgtattgcagcaaatttaagatctcaaacttcatcaacaatcggagttattattacggatatatctaatacgttttttacagaattgttaattggagtacacgaggagctcgagaaagacggatatacggtgtttttaggtacaacgtttgattcggataatcgacaggatcagctgctttctacgatgctagagcatcgggtaggaggcattattttatgtcctgttgcgggtacatcggaagatacgataagaaaaattcagcatttagatgttccttcagtactagcagtaagagaattgcctgaggtggagtcagattatgtaggggtagattatagcttaggcgttcaaaaagcggttcaacacttacttgaacagggacacaaaagaatcgcatttttaggaggaacaaccggttctacaacgtggaaagaaagaatggaaggttaccgcttggctttaaagaacgcaggaatttctattgatgaagagcttgttattccgagcggtccgacaagaagcggcggtgtagaagctgcacgtcaagtgctggacatttctgagcctccaacagcagttttttgttttagcgacttagttgcatttggtgttatgcaaggtttaaaagagaaagggattgttccgggagaagatatagcggtagtgggatttgataatgtcatggaatcatccgtatgtcaccctactctaacaaccgtctcttcttttgcaagacaaataggaaaagatgctgcacggtgtcttcataaccaaattgttgataaaaaagaacatcatcatcgcattattttaacgcctcagttagttgttcgagaatcctcatcaaaaaaaagaagcagttaatgaactgcttctttttttgtgaattatttagacggttcataaatatcccaagccattttcaaggaatcaacaatataatttgctacttcttcaatatccaaattgtcagtttctactttggagtggtggttggaataaattgcttgtcgtgtataaaataattcttcaatatcctctagacttcttccttgtaaaacagggcgactgtcaataatgagactgatgcgctctttccatgaatcccatgaaaggtctaaaaagaatacaatacaatttgataagcatattttttgaatttcttcttgaagaaatgcgcctccgccaacggatataatttttaaacgctgctgagataactggctaattacttctttttctttatttcggaaaaactcttcaccaaactctttaaagatttgtgatgtaggcatttgaaacattttttcgatttcttggtctatatcgacaaaatctctgtataatttcttagcgactagttcgccgattgttgttttacctacgcccataaagccaataaatacaatgcttttttctctaagagacatctcgctgtaagtcatttttcaaagcctctttctgtttttaacaataaaaaacttattattttgtattttagttattagaattataatacaaattttactgtttgtaaaaacagtgaaaggtatattatgtcctaagaagcaagtatcagctcacgtttataaaattcttgttagtcaacagatggtgatacgctgtaaccaaaacaaataagtaatagttaagctcgagcatagtcataaatctttgtcatattgacagtgctgctatcttacatgctcctacagtgtatgtaagaaaaaaaaggaagtgaatgtgaaactacgtaaacgagtataagcaaactggactcaggatcaataaatatttttagaaaattctttaatttcctattgctagattaaaatttctgttgtaggattatgataacgtttacaaattgagttattactttaaatcaataggatttatagaaaactgcatcaaaatttagatcgatctaacataaaattagatcgatctaaaaagggtcaggtcaattgttaaaaggagagatcacaatgagctttagacgagcaagaccttatgtaaataaagaatggcttgaaggtaatcgatcagcagtaagtattaaaagtccgtattcgcagaaagtaattggtgagcaaattatagcaacgccagaagatgttgaacgagcgctatcagctgcctatgaagctaaaaaaacaattgcgagtctgtcttcatatgaaagggccaaaattttaaaagaagcagcacggcttttggaaaagcaaaaagaaaagtttgcttctctcatctcaaatgagttaggaaaacccctgaagaatacgttggatgaagtatctcgatctgtagaaacattagagcaatctgcggaagaagcaaaaaggcttatcggtgaaacgataccaggagatgcttccgaacgagggggaaaagcgatagcttccacattccgtgtgcctgtcggggttgttgctgctattactccttttaatgcacctttgaatttagtatgccacaaaattggaccagcttttgctgctggcaacagtgttattttaaaaccagctccgcaaacagccctagttgcttcagaatttatagctctattattagaagctggaatgcctgaatgcgctattaatatggttttagggggagtagaaacaggacagcaaatcgtaaaagatgaccgtgtaaatataatttcttttaccggtggaacagtggcaagcagaaatatatgtgaactggctggaatgaaaaaagtgcttctagaattaggaggaaatgcttcaacgattgttcatgaagatgccgacattaagaaagctgctgaaatgtgtgggagaacagggtttagcaactccggtcaaagctgtatttcagttcagcgtatttatgtacatgactcagttgtttctgaatttacagagcttctgaacaatgaggtaacgtctttaaaagttggtgatcctctgctgccgcagacggatgttggatgtttagtagatgaaaaagcagcaaaccgagttttggcttggattgaagaagcagtcgctctaggtgcaaagctgatatgcggtggtaaaaagacaggggcttctatagaacctactgttctattaaatcctcctaaacaaagcaaagtggtgtgtcaagaagtgtttgggcctgtggtgagcatcattccttatcaagatattgaagaagctattcgggaaacaaatgattcatcattcggtttgcaagcagggctgtttacaaatcaaatggatttagcttaccgtgttgctgaatctttagaagtaggaggagttgtgattaatgggacctctaattttcggctcgaccattggccgtacggcgggataaaagacagcggcgttggtagagaaggacctcgatttgcgattgaagatatgacagaaacaaaaatgattgtcctgcagctatcgtagctgagtttattacctaaaaaaataaatagtgaatttaaagggggatatagaatggaaaaattaatatcacatcaattagtaaattatcttgaggaacgaggcattgagcatatttttggtttgtgtggtcatacaaacatagcggtactaacagccttagaagaaagcaaaattaaatttatcaacgttcgacacgaacaaattgcagcgcatgcagctgatggctatgcacgtgtgacgaaaaaagcagcagtagtattaagtcacttaggtcctggcttaacaaatgctgctacaggtgtagccaatgcagcgttagactcaattccaatggtggtcatcgctggtgatgttcctactcattattatggaaagcatccgcatcaagaggtaaatttacatgctgatgcttcccaatatgaaatttatcgtccattcgttaagcgtgcatggagagttgaccggccagatttatttccagaaatattagagaaagcatttttactagcggaaagtggaaatcctggccctgtattagtatctgtacctatggatatcttttcaaaaaagatcgatgttgctttatttgatcgattgcatcgccaaacgaaatctttgcaaaaaccttctattgatgatgaaacggcaaagagtattgtacaaaaattaattaatgctaaaaatccagtgttatatgtaggcggaggcatcctattagcagatgcagcaaatgaattaaaagagcttgtggaccacttgaacattccggtagcccactccttaatgggcaaaggagcacttccagatgatcatgacttgactctagggatgactggtttttggggcacgaagtttatcaatgaaaagtgtcggactgctgattatattttagcattaggaacacgatttgcagaagcagattctagctcctgggagccggaatatacgtttgatttttcaaaaacaaaattgcttcatattgatattgatcctagcgagatagggcgtaattaccctgccgaaatcggtgcagtggctgatttaaaacaagcccttaaagtcttaaatcgcgtagctaaacagcttattccggaaggagtaaaaaatgaagcattaatcaaagagattgcttcttatcgtgaagagtttaaagctagcaatgaagaatatattcacgacaattcattcccaatgcagccgcagcgaattttaaatgaagttcgcgaagttctgccgaaagatgcctatattactactgatgtaggctggaataagaatggggtaggacagcagtttccaatctatgaagctggaagtatattaactccaggaggttttgccacaatgggatttggagcgccggcagctttaggagcaaaggtagctcagcctgataaagtagttgtttctctagtaggagacgggggattcggccaaaatccagctgtgcttgctacggcagccgaagagaatatccctgtggtgtggatcattatgaacaactttgcgtttggtacgatcgcgggactgcaaaaagcacattttggaactactctaggcacggtatttgaaaaagatggagaggtatattctcctgactttgcaagtatcgctaaagcttatggagtagaaggtataaaaattcagtcagccgaagagtttaaaccggcacttcaaagagctgttgcttctaatagaccagttgtaattgatgtggcaatgttaaacaatcctgtaccaacgtcaggacattggaacatcatggatatttactcaccggataagaaagtacaccatgtatctgtttaacaagtatggaacaaatgctgaaatgaaaacggaaacatttaactttgataaaaaggagctgttcctatgctagaacgaggagaaggagctcattctcccgctatttgtacgcctttagtgggcaaagatcgcaaagagcttttaacagagctagcggaaattctattaaaaaaaccggatataattgaatggcgcttagatttttacgaagaaattcaagatataaacagcgtcctttctgcagctaaggatatatatgaaaatagtgagcgcacacctattttgcttactgtacgttctcaaaaagaaggggggcagcctatttccttatcagaaaaggaagtagtagccatacttgcagaggtatgtaagcatccatatgtagcaattattgattttgaagtatcaaatcagccagagcatatccgctatttacgtgaagtttccaaggaaaataataagaaacttgtgctttcttatcataatttttcttttacgcctcctaaagcggaaatttttaaaagcttatttctagctgaattttacggagcagatgcagcgaaagcggctgtcatgcctcagaacaatcaagatgttttaactttattggaagctacaagagaggctgaaaaagagctcaccattcctctcattaccatgtcgatgggagggttaggagctattagccggatcgtcgggtggatgtacggatcttctgttactttcgctgtagggaaaagcagctcagctcctgggcaagttccaattgatgaattacgaaaaataattcagttaacaaaaaaagttacgggtcctgagagccattattctcatcaaattgtttcgatataaaataaaaagcacaagagcatagcatgctcttgtgctttttatttatcctttaaatgcatggaaagatacacccgagtatcttttttgtgctcgtactttggattagcgcttcgcgtatattcttttgactgatgttctatatggtagttctgttcaaactgtttgatcgcttcattaatttcttcttgttttcccattaatcttacttgcagcattgcaacgtctccttccatatactttgctttttgactatatcatgaaatgaaaaagaagtaattttattttttgttgacgaacttgtatatacaggttagaataaaaacataaaacttgtatatacaggtttgtgctgagatttatataggggataggaaatacaggagtaaaatgaaaacggaaacaagggggaaaagacatgaatcgagaatctgttgaacgcattgtagaagccgttggcggaaaagaaaatatctctgctgcaacgcattgtgtaacgcgtcttcgacttgttttaaaagatgaagataaagtcaatcaacgtatgctagatgagcacgaattagtaaaaggatctttttctacaaacggccagtttcaagttgttattggtcaaggcacggttgataaagtatataaagaaatggtgacgcttacaggtataggtgaactatctaaagaagaagtgaaaaacgaagcggctaaaaacttaaatccgctgcagcgcgcaataaaaacattagctgacatctttattcccattttaccggccatcgtaaccgcgggtttattgatgggaatcaataatgtactaacaggagccggaattttttacgatgataaatcaatcgtagatgttcatacacagtggaaagacttcgcgagcatgattaatttaattgccaatacggcatttgcctttttgccagctcttattgggtggtcagctgttacgcgttttggaggaagccctttatttggaattgtccttgggctcatgcttgtacaccctgatttgctaaatgcctggtcttatggagaagcattaaaaaaaggaagtatcgatacgtggaatttatttggtctgcacgttgagaaagttggctatcaagggcaggttttacctgtgttagctgcttcgtttgtgttagcaaaaatcgaattgtttttacgaaaacgaataccggatggttttcagcttttaattgtagcgcctgtagctcttttagtaacagggtttctcgcttttattgtgattggtccgattacatttgcaataggaaatgttattacaggtgcagttgtatggctgtttaaaacggctccatttattggagggcttgtatacggaggtttatatgctccccttgttattacgggcatgcaccatacatttttagcggtagatttacagctgattggaagcgtaggaagtacgttcttatggccaatggtagcgttatctaatattgcacaaggctctgcggcttttgcgataatgattctttcaaaaaatgatgagaaattaaaaggactgtctttaacgtcaggaatttcagcgtggcttggcattacggagcctgcaatgtttggtgtgaatttacgctttagatttgcttttatttctgcagtgattggttcagctattgcaggtgtcgtcatatccgtggcgggagtgaaagcagcatcggtgggaattggtggtatccctgctccgttatcaattgttccgcagagctggccagcttttattattggaatgataatcgtaattgtggtgccgtttcttttaacgttaacgcttggaaagcttcagaaaaaatcaaccgttacatcaactgtcgcggctacagaatcgtttcaacataatccaaagaattaaatggtggtgttaaaaatgcaagaaccttggtggaaaaaatcggttgtctatcaaatttaccctaaaagcttttatgatacgactggcaacggcgtgggtgatatagctggaattattgaaaagctagattatttgaaaaagcttggcgtagacgttgtgtggctaacgccaatttataaatcgccgcagcgggacaatggatatgatataagtgattattttgttattcaagaagaatacggaacaatggaggacttcgatcgtttaataacagaagcgcataagcgggatcttaaaatcatcatggatattgtcgttaatcatacgtcaactgaacatgaatggtttcaagaagctaaaaaatcgaaagataacccgtacagagatttttatatttggaaagatcaaaaagaagatggaagtgctccgacgaattgggtttcaaaatttggaggttcggcgtgggagcatgataagctgacagaacaatcctatctgcatttgtttgatgtcacgcaagcggatttgaactgggaaaatgagcgtgtgcgccgcagcgtgtacgatatgatgacgttttggtttgaaaaaggagtagatggatttcgtctcgacgttattaacttaatttcaaaagatcagcgctttttagatgatgatggttctatggcgccaggagatggacggaaattttataccgacggtcctcgcgttcacgaatatatgcgagaaatgaatcaagaagttttttcaaaatacgatagcatgaccgttggggaaatgtcgtcgacaactgttgaccactgtattcaatattctcatccggaccggggcgagcttagcatgacgtttaattttcatcatttgaaagtcgattacccaaacggagaaaagtgggcgctagcagattttgattttattaaattaaaagagattctatcaacttggcaaagggagatgaataaaggagggggatggaatgcactattttggtgcaaccatgatcagcctcgcgttgtttcccgctatggaaacgatgaactctatcataataaatctgccaaaatgctcgccgcagccattcatctgatgcagggaacaccttatatttatcaaggggaagaaatcggtatgacaaacccgaagttttcctctattgatgaatatagagatgtggagtcattaaatgtgtatgagataaaacgtgcacaaggaatgaacgaaaatgaaattttggagattttaaaacataaatcaagagataattcccgtacaccggtacaatggagcgatgagccaaatgcaggttttacaaaaggaaagccatggattaatccggccgataactaccgtgaaattaatgtggaaaaagcgttagatgatgaagattcaattttttatttttatcaaaagcttattgcactgcgcaagcagtatgagattattacctatggaaactatgaattgattcttggagaagacgagcagatttttgcttatatccgaaatggagcaggtgaaaagctgttggtgataaataatttctacggcagcgaaacagcctttgaactgccagaagatataacttttgaaggatatcatagtgaaatattgctgtctaactacaaagattcatcaaaggaattcaagcaagtcttacttcggccgtatgaatcaatcgtgtatcatttaaaaaaatagagaaaaaagtaaaaagaacgatgggtgacaatctatcgttctttttatacaattgggtatatatagaaagtaaaataggtgatggcaattgaaagaaaataaatttatcagtatttacgaacagttagtcgataaaattaaacgtggtgactggcgtcctaatatgaaacttccttctgaaaatgagcttgttgaacagtatcaaacgtctcgtgaaacgatacggaaagcgttaaatttactttcacaaaatgggtacattcaaaaaatgaaaggaaaaggctcatttgtattggacgtatcacgctttgattttccagtatcaggacttgttagcttcaaggaaatggcggaaaagctaggacatacatcgattactattgtaaaagaatttgaattagttaaggccgatcaagatttgtgcacacagcttggggcgacgaaaaaagatcttatatggaaagtggttcgagcacgggaaatcgatggggagaaaattattttagataaagatttttttcataaaaagtatgttcctcacctcacaaaagacatatgtaaaggctctatttatgaatacttagaaaaagatcttgggctaaaaataagctttgccaaaaaagaaatttccgttgacgagctgacggacgaagataagtgttacttagatttaaaagactatgaacatattgtggtagtaagaaactatgtgtatttagaagatgcaagcctttttcaatatacggaatcacgtcatcgtcttgataagtttcgttttgtagattttgctcgcaggggtatataatgttttactgcccatgagtttttcctttttgtatatgtttacaaaaaactgctttggtataaaaaacaaagcagtttttttatggagaaaattgaaaaaacgtgatccttttgacgataaaactttaaaaaggttgaatttttctttggagtttgttttagtagaacataagattattttatatttgtataatgttatccatacaagatagagatttattgttcttttttttattagatatataagaaaatgttatttaaaaacaacaattacattagtaattctaatgaatgtatctaactacagcattaaagggagctgctcaaacaatactaagtaaaaaggaggagacggaatgagtcacgattatcgactttatcctcttggtgacagcggcattgtcgtttcatttggagacgaaattaatttcggcatacataaacgtattcagcaatttactgaggtgctagagcaatcattatgtaagggaatgattgaatatgtgccggcttttacaacagttacaatctattatgatccttggataatgagtgaaaaaggaagaagaaatccttacacagcaatatctatatatattgaagaactgcttttccgccaggaagaaaaatctgaagcagtcgctagacaaattgaaattccggtgtgttacggaggaaagtacggaccggacttagagagagtagctgcttttcattcattaacgcctgatgaagttatctccattcatacaaatggagaatatttggtgtatatgctaggctttgctcctggttttccttacttgggagggatgagcgaagaaattgcgactccaagaaaagaatcaccgagaaacagcatcccaaaagggtcagttggcatcgcaggaatgcaaaccggcgtgtacccaatcgagacacctggaggatggcagttaatcgggcgtactcctcttacactatttaacccaaaaaatgattcgccaagcttgcttcaagcaggtgatcgtatccgatttgtttccatttctgaaacggaatatgaagcccaaaaggaggtggatgaagatgagtattaaagtgatacgtcccggtttattaacaacgattcaagatatcggcagacatggatatcaaaaggacggcatgattgtcagcggggcaatggataaagttgctttaaggattgccaacttattagtaggaaatcaagaaaatcagccggttattgaaattacgttaatgggaccaaaaattgaatttcagcaagatgctttgattgccctgacgggaggggatttatcgccaactgttaatgatgaagccgtaaagatgtggcgacctttatatgtgaaaaaagggagcgtgctgcagtttggtgttccgattttaggatgccgttcttatttatcggtttccggtgcttttaatgttcctgcagttatgggaagtacatctacttcactccgcgctcggataggcgggctgcatggtaaagcattacagtcaggggacgaagtattaagccaccctcctacagaaacaggggaagcaattataaagaaactggtgaaaaagcaaacggaccgctcttttcagcaggctttttggacgattcatcctaaacttcttccttcatacgagacgcctattatccgcacgatgaaaggtgcagaatttgattggtttacaaaagaaagtcaacaacatttctttaatcaagaatttgacgttacccctcaatctgaccgtatgggctataggctaaaagggaagaaattagttcttggtcaagaaaaagagctgctctctagcgctgtgacgttcggtacgattcaagtaccaaaagaagggcagcccattgttttattagcagatcatcaaaccacaggaggataccctagaatcggacaggtagcaactgcagatttttcagcgctggcgcaaatttctccagggaaaaaggtttcttttcaagcaatttcactggatgaagcgcagtatttatacatggagcaggaaaagaaaataaatcatattaaaagagcacttcgaatgaaaatataaggaggaagaagatggctaccgttgatttgaactgtgacttaggggagagctttgggaactatagattaggaaatgataaagaaattttacgctatgtaacgtctgcaaacattgcttgtggttttcatgccggagatccttcggttatgagagaaacagtaaagctggctttgagtgaaaatgtggcgattggcgcgcaccccggattgcaagatttagctggatttggacgtagatatatgaaaattacgcctcgagaagcttatgatttgatggtatatcaaatgggggctctttcagcttttatacgtgcagaaggaggggcccttcatcatgtgaaacctcatggcgctttatataatatggctgcaggagatcgagacatagctaaagctattgctgaagccgtttataatgttagtgaggaagctattttatatggtttggctggaagtgaattgattaaagccggaaacgaaataggcttgcgtatgtctcaggaagtatttgcagatcgaacctatcaacagaacggtatgctgacgccgagaaacgttgaaaacgccgtgattcaagatgaagaagcggctatttctcaagtaattaaaatggtcaaagaaaagaaagtgtttactgtgcaaaatgaagagattcccattcaagcagataccgtttgtattcatggagacggtgcacatgctgttgaatttgccaaagctatttgtgacaagctaaaagaagaacaaattattattcaaccacaatgaggtgacatcatgaaaaaagaacgcaactggagcgtgctgctcggagcagcatttttaatggctacttcagcagtggggccaggttttttaactcaaacaacggtctttacacaagctctcgccgcaagttttggttttgtcattttactgtcgattttattagacattggcgttcagctaaacgtatggcgtattattgccgtttcagaaaaaagagcacaggatatcgctaacaatgttttgccaggcctcggcttatttattgctattttaattgtaatcgggggcttagcatttaatattggaaatgtaggaggagcgggtcttggcttcaatgcgctatttggtatttctcctaaagcgggtgcagtcattacagccatcatttctatcgcaatttttttagtcaaagaagccggaaaattaatggatcgatttgctcaattaatgggtggaatattaattgttttaatggtgtatgttgcagtttcttccgctccgccattaggagaagcagtatctaaaacattttggccggatcacattgacgtaatggcgattgttactcttgtaggaggaacggtaggaggatatattacatttgcaggaggtcaccgtttattagatgcaggaatcaaaggaaaagccgcgattcctgaagtaacaagaggagcagtatccggtattacgattgcttcgatcattcgaatttttctatttttagccacactaggtgtgttgagtcaaggactaaagctgaatcctgataatccacctgcctctgtttttcagttagccgcaggggatattggctataaattattcggtgttgtcatggcagcggcggctatcacttcagttattggttcggcatatacatcggtttcctttattaaatccttcagtaaaaggattgagaaatatgaaaactggattatcattgcatttattacgatttcaaccctggttttcttaacgattggccagccggtcacgctgcttattttagctggagcattaaatgggctaatcttacctattacacttggaacgatgcttatagcggcgtataaaaagaagatagtaggcgattacaagcatccaacttggcttgccgtttttggcggttttgtggtcgttattatggctgtgctaggagtctatacgcttgtgactcaaatggcaaaactgtggtaaggaattctataaccaattaaaaaagggccagaaggcccttttttaattggttataggcaatacatataaaatgattgctaaaaagtggagtacggttccgccaagaacaaacatatgccaaatcatatgatgaaaacgaaatcctcgccatacgtaaaaaacagccccgattgtatacaacacgcctcctactacgagaaggacaattccttgatgggcaatgttttgagttaacgaatcccaagcaaacacaatcatccatcccataaatacgtaaagaatggtggaaataaaaaggaatttctttacaaaaaaagctttgaatacaattcctgcaagagcgatgccccatacaattccaaaaagtgtccagccggtggttccttttactgcgataaataaaaatggagtgtacgtaccggcaataaacaaataaatagaagagtggtcaaatatctcaaaaagatcttttaccttaccttctggaaagctatggacaagcgtagaggagacatagagaagcagcatggttactccgtaaatagtaaaactgataacatgccaaggcgttccttctaacgaagaaagtacgattaaaagcgttaatccaacaatgctgagtacggctccaacgccgtgtgtaatcgcatttgcaatttcttctcctcttgtaaatgtgtgtgtagtagccatttacaaaatcctttctttacacaaaattatcttctattttctcagaggatcagttttgaacgtacctgctgagaaaaaatccgtaactgtcaaaaacatgagtgaaaaggtcattggttatttctttattatagaccattcttttgattttatctattttgactggaggtccgaaaagaggaaagatgtatatgtgaatgttcactagctgtaaaaagcatgtatagaagaaaaaattgctttttaaaaaaatggaagaaaagttgtcatgaaggcatgattttgaaatacatataaaataaaacttttaacagtcaaggttacgattactgcttagctcatttgcaatagataagtaacaagattgtaagaaggcagggggatggaagcagtgaaaaaagaagttatttttgatgaaactggcacatacaaatactctctattatgcaaatggagtgaagtaaacgaacgtaaacttacgtttatcttgtcatttccagaaaatacgtatgaatacagcgacgatacagctgtatccaaatgcatagaactggcgcaaaagtggggatttggagtcttagaaatcgtttatttattcagctatcaaaccgaccatgtttcgtttttacgcatgctttcaaaagaagaagctgttggaacaagaacaggtgaatatattcaaaaagcagtggaggatgctgaactggttgtggtagcttggggtgatcatggaagcatttataaccggcaagaggaagtagaacgctttttgaaacacaagccggtatactgttttggaaaaacgaagcagcaatttcctcgccatattttatccgtcgtgcatcgtacagaattacaaaaatacgaaatgccggctaatcgtgaagagtcggaagaagtttcttcgtttattgaagacatagatcaaagttttggtggagaggattattcgccaattaaacaactaacagaagaagaaccgcttatgtttattgaagatattgccagtatgtatcggtaaaaagaagaagcgaggtttatattcctcgctttttcgttagtataaaacaccaagttttgtcatatggttgtatcaagaagcgtgtgtgaagggggaactttatgaagttaaatgaagtattgcaccgcatcacaactatttataatgagttagaagaagagtgctttcaatatatagggactgtgatcaacgaaaatgcagagctggatatttctcgtcttgaagaactaagtacgctgttaaacttcgtatatgaatgctcgcaggatgtattagtaggttctattttaacaaaattggattatggacaacccatttatcaatttgctatgttaaagcctatttcccttgaaggaaatgaagataagttagatattttatatgaagaaaaggtaaaagtagaaagagctattctagatgtgtatacagctcagcgaaagaagttattgactcaagcagctgaagacttaaaagaactgcactacgagctgcagacctatgtgtatgcttgcaacatataagtgaatctgttgaaatggcaaggcatatatacaaataaaagggaacatgttaggataaataaaaagaactcctaatcaaagagttctttttattgtgaaatatatgattttgaactagtaaagcataaagacggtggtaatggcagttacccttttctttgtgctttttttatccgattgtgttgatgatactgcttactgcgttaaaaaagttcataagtacctcgtttagcatgtaatatgcctcctctcttactaaatatgtacaatcaaattatccaattgtgttaatgatgctgcttaccgcgttaaataagttcattaaaacgtcgttgaacatgtttgcaacctcctttatgatagattcatatagtaatacgataaaacataaagtttggatcacattttttaaatgtttttttagaaaaatagttaaaaagagaatttaatggaggttaaagaagatgaattcgtttacaaacgacgaaaagcaagcggtatacaaagcgatttatggaagaagagatgtacgaacatttttgtctgatgagattccgaatgaaacggtctataacattctacaggctgctcacagcggaccttccgtcgggtttatgcagccttggaattttatattagtatctgatacagaagtgaaaaataaacttgcctgggcagcagataaagagagaagggcactggctattcattatgaaggtgaaaagaaagaagattttttagagctcaagattcaaggattaaaagaggcgccattaactatttgcgtaacgtgtgatccaacaagagggggctctcatgttctcggaagaaactcaattccagaaaccgatatgatgtcaactgcgtgtgcgattcaaaatatgtggcttgcttcatatgcagaaggactggcaatgggttgggtaagtttttataagaaaaatgatgtacgtgacattttacatattcctcctcatattgatcctgtagcgctcatgtcaattggctatacagataaataccctgagaaaccaatcttagaacaagctaactgggaaaaaagaagggatttagacaagctaatttatcataatgtatgggaaaatgaaaaagaatagtggagagaaaataaagacataataaaaagcgccgaaatatagtaaaatttgaatattaaatgatacactatatatagcgaaagcggatatgagcgtctagcgtatccgttttatttatatgtatacaaatgacttgggaaaaagagagataggagaattgaaggtttcatgaatattgcaagaagttggcttcacaacaaacttactattcgcatcattacgcttattatcattacagttttacttgtcagcattagaagtatgcttcagctgctgttatttacgtttatttttacctttttaattggtcgttttcaacaaacgttaagaagaaagcttccgcttaattcaacgcttatactcatcgtcatctatatcgcactgattggggccctcggtattgtaggatatgtatacatcccggttattatgacgcaagttaccgagcttgtacagaagctgatgtatttttacaagcacccccctgataatacattcgtcacctatattatcgataatctaaagagattcaaatcaccggagaatattcagcagaatattgatttagtatacagctatttatctaatattggaaaagtaagtgcacaagttttcttagcactcttgttaagcctattctttttacttgaaaagtcgcggattcaccgattatttgtccaattggaacaatctaggctgggctggtttttcaaagaagcgggctatttggggagaaaatttgttaattccttcggcaaggtaatagaagttcagtttattatcgcttttgtgaacagcattttatccgttattgcgctgtgggtgttagggtttcctaatttgcttgcacttggcgttatggtctttctactagggctagtgccggttcttggggtatttgtttcactcattccactttgtacaatcgcttacagtttaggaggcggtgtaaaagtactatctgtgttaattatggtggtagtacttcacgcacttgaaagctatgtattaaatccaaagctcatgtcatctaaaacaaacttgccaacgttcattacgtttatcattttagtgtttggtgaacacttcttaggcgtatgggggctgattcttggtattcctatttttattttctttttagatttagtaggagtagattcagcacagcaactgtcaaaaaaagaagaggctgggacaaaatgattttagacgaggtgaaaaacgagccattaatcaacatgtttgactagtggttcgtttttttttgttatagtgaatgtaggtttcatctgttttcgtttcttctagcagttgattggagggcaaggtgaagactcctacgggaaaagcggaacaggtgagaccccgcaggagcgtaagcgacgaggaggctcagcggccgcccgcggaaagcgaagccttgcatggaaatcaactgcggtgtcacaagcggttcagctcatgtatcctgtttgttcgtctttagaatggattcatgtcattatttctcaacctcttctttttttaacgagcgtatcgttttttgaatgattggatgatctcgatgcttaagtttataagcaagaaagatctgattttttaccgctaaatgttcaagttcaattttcacctttttttctcggagcgcttcttgaatcaaatagcggggaagcaggctgattcccatgtggtgctgaatggcttttaacaccgtttgaagatttggaattacatgatgaggctgaatttcaggtcgttttttaaaatgctgccgccaaaatctcctgataataggaagttcaagaccatagctaatccaccgctgattatataaaaaatcttctacgtctttactagctgtcatttcaaaagaaggagggacggttaagacaaactcttcttcttcaatgaccgtatattcaattccaggtatttgcaatctttgggttgtaatcgcaatatcaatttcgtcgctttgtatcttttcaagcaaaacagaagcaataccaaactggctgtagcagcggatacctgcatcttttattctttctaaagcttgttcggtaaaatactctacgggagaaccaatttttacgaccggcagcgcgtcgggagatgaagcggtcatttttagttcaattgaagcagcttctaggctttcaattaacgggacaatacgcgtgtacagttctttacctttttctgttggaatcatctttctcggtgcacggataaataaaccttcgcctatttcagcttctaaagcagctaagtgctgactcatggccggctgcgttaagatcctcgctctggctgcttcagaaacagatcgatatttgtaaatgctaataaagctgcgataccattcaaaatcaatcatttatgtcatcctttcttataaatttatttatggatatctatttattttctaatttgtattatagacaagctctctttaaaataaaaatagtaagcaaatcatttttagatagaataattaaagcaacgctaggcaaatgatttaaaaaggagagttagactgtgaaagcattattattgcaagataaaaataaatggacagaaatgaaagtagaagaaatagaaaaacctcttccaaataaaggggaagtagtagttgaagttcacgcagtgggacttaatcccgtagattataaaacggctactaacggaaaccctcattggacatatcctcacattctaggtttagatgtagctgggacaattgatgaagttggagaaggagtagttgactggaaaaaaggagaccacgttgtctatcacggggactttatgaaaaaaggcggatatgctgaatatgcggttacgactgctcattcaatttcgcgcattcctcatgctgttacatttgaagaagctgctgctttgcctactgcaggttacacagcttatgaagcactatttcgtaaacttccaatgaaccatattcaaaccatcttaattcatggaggagctggaggcgtaggaggctttggcgtacagcttgctaaaaacgctggaaaaaccgttttctcaacagcttcattacataatcatgagtatgtgaagtcgttaggagctgattatgtaattgattatcgcgaggaaaacgtcgtggaaaaagtattggagctgacaaatggccgcggcttagatgctgtgcttgatacggtgagcgcaaagaacgcaacggattctttagatatgattgcctatagaggacatttagcacatattgctggtgcacctgattatacaaaagtaaagccttttacaaaggtgatttcttatcatgaagtagctttaaatgctgcacatcacattgatgacatgattgcgcaagcggatttagcaaaaatgggtgatgagcttttagcattagtagcagagaagaaagtagctccgatgattgagcgcatcatctcgttaaaagaagtgccaagtgcattagaagagctatcaaaccgccatgtgaaagggaaaattattgctaaagttaaataatagtaggacagaaaagactcttttattacaactaataaaagagtcttttttctgctattttctttttttgcgttacttcacttataaactgcatatgatagaagataatcaaatatagcaaacgggtgcgtatgagctttttttactagtaaaattgctttgaaatcgtgaaattttgaatagtttgagttatgatgaaagaacgtgaaatttgtatgattgaaaggagaaaaaaggtgcaagggtttattgattttgtacaaaatttaggcatagtgggcatctttattgctacagcaatcgaagctgcggcaattccttttccgtgtacgttatcgattttgcttattggctcggtgctgcagctctcaatatggaaaatccttattgtttcagctgtcaataccgttatttatatcgcattcaactatattccgttcgttatgggatacaggtttgaatctattaccaagcgctggtttggtgaaaaaaatataaagcgtgcccaaaaatggtttcataaatatggaaaatggagtattacgatttctcgtcccatcagtatcgcaaactatataacctatttggcaggtcttagtaaaatcaaatctagggactttgttttatacagcaccttaggcatttttccgtggtttgtttttttgctctatgtaggaggacttggagatattgaaaaaatccaaaaatatttgcatgatgttgatcgtttaatatttgttattcttataatcggagtgatagttggtgcaggctggtggatgaaaaagagaagagaaagccacgctcaagaataaagctataattatggttatagctttattttaatataaagaaattctttaaataaaaagatttttctgaaaagtaacaaaaaaacatttttccttttaaaaaaatgtgatactatgatacataaggtcgctaagagttgtcttggttcaccgggtgtttactgcattcatttaataaaagaagccaggtataggtgaaagctttgtttctagtaatgttgagaaatgctgccttgggaagggaggtaaaacgtacagtacgtgtcaaacttatgttattaaagtcgtaaatttgtaagcggtttctttatttttacatgtgagtagagcagctttggttttgaatgcagcttgttacgggtttgttgaatagtcagtatatcttaaaattagatcgatctaattacctgtattatatgaattcgaaatgtgtttgattgtaaatgaagataagctgaaaaagtacaggttaggtaccacaaatatttctgaattttaataaaacaggaggtaaaatcatgaaaagcgtagggcgtattaatggtaaaactcagctcatcggccttttagcaactccaattggacattcattgtcaccatctatgcataatatggcctttaaaaaactgggattaaattatgcttatttagcttttgaggtaggaaatgactcgttagaagatgcaattaaagggctgagagcgttaaatgttaaaggttttaatgtatccatgcccaataagacaaaaattctcccgtttcttgatgaattagcagacagcgccaaattttcaggagctgtcaataccgtcgtaaatgataatggcgtactagttgggcatagcacagacggcatgggttacattcgaaatttaaaagagcacggcgtggatatcacaggaaaaaaaatgacgttgatcggttcgggtggagcagcgacgcctattgctattcaagcagctttagaagggcttgaagaattaacaatttttgctcgtcatgatgaattttattcaaaagctgtagaaaacgtaaaaattattaatgaagagatgaaacatgtttcatgtaaagcgaagctgtattctcttgaagatacagacaggttaagagaagaaattaaaacgagcgatattttgacaaatggaacaggagtgggaatgaaaccgttagaagaattcagcattattgaagatatatcaatgctgcgtccggatttaattgtaaccgatgtcgtgtatatgcctatgagatcaaaactgttagaacaagctgaatcaattggatgtcacaccattaatggaataggaatgatgatctggcaaggggccatggcgtttgaattgtggacaggaaaagagatgcctgtggagtatattaaggaacaaatgtttgaaccaagcttacagtattaaaaacgcgtatcttcaaatcttactagaattgtacgaatgaagtgtctgtattttctgtttttttaacgcgataagagaaatatttgtaaaattaatacagttatttttggatttattatattaaaaagtgtttattttaattttctaaaaattaaaaatatatattgcgcaggcaaatgtaattcagtatactaaagctcaagtttgaattgattttatattaggctgtgtcaaaatacgacgcttcgcgaaaaaaggcaggtgttacaatgagaaattaaaaaagcagacgttgatcatcatgttcggatatttgagtagatcataaaatataagcaccgttccgcaatatgtgaagagatttccgctggaattagatcgttctaataaaaatttattagatcgttctaattagaactttctattaatctttttagtttcactaataaaatgtttttacgaaaggataaaagaataagtaaatagctagaggattaggttttcagcattgccatctttcaaattgagttcagacagactttatgtaagcaagtaattataaatgggatctgagcaaagagatattttacaaaaatgaaagcgcatacttaaaatcttatgagtgagggaaaagaatgaaaaaacatcgttggtcgattgtattcttgattgcggttggtgtagttgtaaactattttgatcgaattaatatgtccattgctatgccattgttacaaaaagaatttaacttgacagcaggtcagatggggattttcctatcagcatttgcatggtcttacgctttacttcaacttcctatagggcctttgctagataaaataggcgtaaaatgggtaacgcgtgtagcgaccgtgatatggacagtagcttgtcttttaactgcagtagcaaatggatgggggttaattattttatctcgagtgctgttaggagttggagaagcaccgttctttccatctgctgctaaagcagttagccattgggttccgcgtcaggaacgcggaaaagctatcgcagcttatgattctcaatccaaactttccaacgccatcggagcgcctatattagcactaattgtaacagagtggggctggcgaggcggtttcttagcaactgctattcttagtttcatatatgctattgtttattggatctggtatcgtgaacctcatgaagatgagcgtttgacgaaagaagaatatgactacattgttcaaggcggttctcaaagttcagaagaagttaaaggcagtgcaatggagaacattcgatatttgctaactaaaagaaaagtctgggcagtattcattggatttgcggcatacggctattcatggtttttgttcttgacttggcttcctggatatttagcaacagaaatgaacatgtctattttaaaatcaggctggtactcggccataccgtggattgtaggtaccattactgaaatagtaatcgggggttggcttgttgatcgtcttattaacaaagggtataaccggacgcgtgtcagcaagttttttctagtaataggtatggtatttggtttgtcaattattggggcagcgtttactcacagtgcgaacgtagctgtattttggatttcaacagcacttggaggtcttgttgtcacatctgctgttgcctacagcattcctacatttattgcaccaaaaggaacggtaggaacattaacgggacttttaacatttgggaataactcgatggctattgttgcacctattacgactgggtttattgttcaagccacgggttcatttatgtatgctttccttttagcagctgcttttttagtgattggaattttaagctatacgttcctattaacagatttagacccgattgaaagcaaagagtctattctattagaagaaaaagagttaactttagaaaaataaatcatcttaatatttcgactaatgatattcatttttaacatatcaaaggaaatctactaattaattatcttaattaagcatacaaacagttattaccggaggggattcaacgtgttaaccaaaaattatggacctttaacaggagttcaaataatagatatttctactatgattgctgctccctttggagctactttactagcggacttgggggcggaagtaaccaaaattgagcttccgggaaaaggagatacgcttcggactgtagggccttggaaagggactgaacctttaaggtggcccggacttgctcgcaataaaaagtctgttacgctggacattcgatcagaagaaggagcagaaattttcaaaaagctaattagtggcgtagacattttaattgaaaattttcgcccgggtacactggaaaaatggaacttaggatatgaagagcttaaaaaagttaaccctaagctagtaatggtgcgcgtatcaggttatggacaaacaggtccttatcgagagaaagctggattcggcacaccggggacagcatttagcggacatacctatttacaaggatattcagatcgtccgcccgtcagtccttcttactctttactagattatgtaacgggcatatataccgcgttcgcttgtgtaagcgctatctatcatagagatgtgcacgaacagccggaaggtcaagtagtagaaatgggattatatgaatctatttttcgaatgatggagtttttaatcgctgaatatgatcaaaacggaaaagtaagagagagaagccctggacttgcaggtcactcaagcccagcaggcacatatgaaacaaaagacggaaagtttgttgtattagtatgcagtacagactctacctttgatcgtcttgcagaggcaatggaaagaaaagatatgttaaaggatccgcgatactatacaaacgtagagcgtctaaagcatgatcatgaagttcaggaaattgtatcaaattggattaagtccttcactcaagacgagctgcaggtaaagttagattcatttggcgtgccagttagccctatctacagcattgaagatatatttaatgatccccagtatagagaacgagaaaacattgtagaagtagagcacccccgcctagggaaaattaaggttccgggagtagtgccaaagttttcacatacaccgggagcaattcgtcatcgtgcccctgaattgggagaacataatgaagaaattctaggtggaaaactggggttatcaagtgaagacttagcagtgttaaaagaaaagggggttatttaatgaatactattcaaaaaatagaattaccggaaaaagtcataatctgtgaagtagccccaagggatgggtttcaagctgaacatgagtggattcctacaaaagaaaaaatatctattatccgtcagctagccaagacaggcattcaatcaatggaaattacatcttttgtacatccgagagcgattcctcagttaaaggatgccgagcaggtcgtagaaagtgttcaagatttaacaaatatcaaatttcgcgcgttagtgccgaatgtaaaaggtgcacagagagccattgacgccggagtgaaaaagttaaagcttatgctttcagctacagattctcacagcttgtctaacgcaaattgttctgtagaagaagcccaaaaaggtttttatcctattatcgaattagcggaaaagcataacgttaaagtgggaggttcaatttcggtagcgtttggatgtccttatgaaggaaaagttgctatagaacgcatttcttctattgtagaacgatacagaatgatgggtgtcgaagaaatttctttagcagatacaacagggatggcaaatcctcagcaagtgtatcgtatgctagggtttcttaaacaaaattatcccggcattattttctccatgcatttgcacaatacgagaggaatggcattttctaatgtagtggctgctttgcagcagggtgttattcattttgatagttctattatcgggttaggagggtgtccttacgctccaggtgccactggaaatatagctacagaagatctggttcatggattaagtgaaatgggaattcatacgggcattgatcttaacaagcttattgaagcagcaaaagaggtgaagcaagtaattggtcatgacggtggaagctatatgctgcaagcaggtccttgttcagaacttcatgccaagccaaaggttcaagagaaattagtataactaagccgtgaacatgataaccttttaggaggtgatgggagcgtttaaattaaaataaattagatcgatctattttcctctcatgtaaaaacgttcaggccttgttttatataaaagtttgtttaataaaaatgaaaagttggtgctaaacatgatagaaactattcaaaagaaatcacagccttatattaacggtggatggattattgaagatcgagaagttgctttaataaaaaacccctattctggagaagtcataggtgagcagctattagcgaatgaagaagatgttgaaaaagcattagcatcagcctatgaagcaaaaaaacatgtcgccgccctttcttcttaccagcgttctaaaattttaaagaaagcggctctattactagaacaagagaaagaaaaatttgctcgacttatttctttagaactaggaaagcctttgaaaaatacgctggacgaagtggcccgttcaatcgaaacattggaactgtcaggggaagaagcaaaaagattgattggtgaaacattgcctggcgatgtttcagaacgtggtgcacaagctattgcatctacttttcgagtgcccgttggtgttgtagcggctatcacaccgtttaacgctcctttaaatcttgtatgccataaaattgggccggcttttgctgctgggaatagcgtgattttaaagccttcttcgcaaacaactttaattgcaacagagctcttaaagctgctgctgcgggcaggatttcctaaggatgctgtaaatatggtgcttggtcgaagacaggttgcacagcaaattgtaaaagatgatcgcgtgaacattatttcatttacaggtggaacggtagctagtaaaaatatttgtgagctagctggaatgaaaaaagtattgctagagctaggaggaaatgctgcaacgatcgtccataacgacgcagatttaaaccgtgctgcggctatgtgtgctaaaaccggatttagcaattccggtcagagctgtatctctgttcagagaatttatgtacatcaatctgtggtctctgagtttaccaatcttttaaaagaagaggtgctgaaacttaaaatcggagatcccttattgcctgatacggatgtagggtgtgtagtagatgtccatgcagctgagcgagtgacgagctggattggcgaggccgtacagtcgggggcacaagtgatatgcggaggaaagcgccgcggagctacggtggaacctaccgttctactaaacccttctaaagaaagtaaagttatttgtgaagaagtatttggccctattattagtattgtgccgtacgatacgattgaagaagctattgaagagacaaatgattctgcttttggtcttcaagcagggatttttacgaacaaaatggatttggcttataaagtagctcattctcttgaaatgggcggtgtagttattaatggaacatctaactttagattagatcattggccatatggcggagtgaaaaacagcggtattggcagagaaggtccacgttacgccattgaagaaatgactgaaacgaagatgattgtattaagactgcctacagagaattaaaatcaaatcaatatgtaggacgtttataagcatatatcgtcattttaattagatcgatctaattcgtttgaataaaggaggaagttataaaatgcctaatcaattttcccttgcgtatcttactgttcttggatgttccccgcctgaaatgacgtatatggctgcgaaggcaggatatgattttgttagtttaaggcctatttacatggggttgcctggagagcctaactatgcgttagctgaaaataagcagctgatgcgagaaacaaaatctgctatgtcagaaacaggagtgaagcttcttgatatagagttagcacgtatctatgagggagttgatccaaaacgttacttacctgcaatggaagcagctgctgaacttggaggacgtcacgttcttagcagcatttggacggacgaccgcaattttggtatcgaatgctttgctgaactctgtgatctagctaagccttttgggttaaccattgaattagaatttgttcctattgggagcgtatataaccttaaaggcgcaatggatgttcttcatacggctaatcgtgaaaatgcaggtcttatgattgatatccaccattttcatcgatcaggagataaggtggaagatttggacgacgtgcctcgtgagtggtttcgctatcttcatctttgcaatgcttctgcggaaattccgagttcaaaggaggaaatgactcgagttcttagagaagaacgattgtatttaaatgaagaaggtattgatgttgcaagtattattaatcgtatcccgcaggttccttattccatagagttgccaaatgtaaaacgtgccaacgaactaggatatgaagagtttgcgcgccaatgtttacaaactgctaaacaatacttagataagcatccgcgcaagaagtatgtttctcatcaagatcagctgcgtttccattctacacgataggtattctggagagcattgtgcagcttaccttttaggtttatttaattgaagtacccctacttagcaagcttaaagtgggggtattctctgttaaaacggtaaacgtaagaatcaagaataaatataaaagtgtgacatcatacattcactttgtcataattaatgctaagttcttatttttatatacagtgaaggtttgatgaaaaagagctgctgagaatgtactcaacagcttagtaaataatcgatttattaggaagttgagagagcccgccagcttctataagacgtaatatcctccgcatcttctgtcgcatgagcttcacaaagaaaacccgctacttcactgccgtcttcaagagtgattttgcctagtccgagaggagaagggatagaatcggcaaaagagccgagtagtgataaaggcatttcccaaagttcaacctcaattttttctccttgttgctgtgttcgcaacagccccggttttgctggagaagtaggcagtttaaaaagctggtaataaggagcggtttggtcttttcgtacgaacgaagctccgtgttcacgcatttgagattcaagtggaaacccgcgcatatgcaaaccgcaaacagctactaatgttgtatctttttttgaatcagccgttcgttccccatttaaaaacaattcgctgagtccgcaaatgaattgttcgccgtcaaatgtagagaaaaatgaaatgccaaacggtaaatcaagatccgcatcttgagatggaagagagacagcacacaagtcgagtaagttacaatgatttgtaaaacgccccatgtcactgtttgtttcaattggattttctcttacttgttcccgcgtccacgttccgcctgctgtcggcataacaagaacagcatttttaagttgatgatatgctttatgtttaaaggattgaagcttatgtgaagcttgaaataaagcagcagcatcatattctgatttagctcctgaacgaagcacttgctcggttacaggaaagactgtttcttcatgagaagtgataaattctcctaagtcagcccagcgctctgctacgtaagggccgtcatataataaagcagctgctttacttaaatacgagccgtcaatgtattcgatgggaatagataaatcttcaatctttttcacagcttgtttccacgctttttcgtactgctcagcaaacggcccgtaaaacgaaagcggttcttttaccatataaattttttcaggaagcgccgaagaagcccgaacaacagagcgtgaccatgggtctcgatcgtctactcctctaataatggaatctacaagcagtacgtcactccattcatgagcaaaagcagtgacgcagtctaagcttttacatgccggaactacacctgcagatgaccaagctccgagggaaggtttatagccgattagacggtttaaaccagctggaacccgccctgaacctgctgtatcggtgcctaaagaaaaagcagcatgcccccgagctacggatacagctgatcctgagctcgatccgccgctaatgagctctggctttaacgcattgtgcgtttcgccatatgggctccgtgtaccgaccagtcctgtagcaaattggtccaagttggtctttccaagaggaatagcacctgcatcgataaggtgttgaacaaccgtagcatgttcagaagggatatacgtatattctttacatccggctgtcgtcggtacatgtgctacatcgatattatctttaatggcgaatggaattccccacaaaggcaacgcttcagggcttagcgtagctaagcgatccagataaggttttaactcatcgagtgtaggaggggtaatccaaatattcatgtctttgtcagcttctacacgcgtgaaaatttgatgtactacatcttccggagttaattcttttttgatatacatattacgtaaccattgaaccgaaaatgttttaggcaagctcactgttttcattgtatccaccgtccttaatgagtaattggagcaaaggcttttataccggcaatcagctgtccagcttgtacttcatcgccgggttttacatgaatagaactgatatatccatccataggtgctagctgcggaaactccattttcatgctttcttcgataattaacgtatcgcctttttcaactttttgtccttcttctacaagaactttccatacgcttcccggcattgtacagcgcgcggcttccgtaccttcgggcagttcttgttccgtaatttcagctgtttcatgttcagagacgtactcagctaaaccaagtgctttccaattttctcgttctgtttgaaaagcaccctgctgggtatgacgaaaagcagctgtgctttcttcaatggatgaaagaaaatctaaatattctccaagtttaaacgttgtctccgtaatatctgcttcaaatctcccacgaaggaaatcttcgcgcagttttaaaagctcgtctgcttctactgggtaaaattgaatttgatcaaagaaacgaagaagccacggttttcctgtttcaaaactttccgtttgacgaagtcggttccacatttgaatcgtgcgtcccacaaattgatagccgccaggaccttccattccgtatacgcacatatacgcaccgccaataccaactgcattttcaggcgtccatgtacgggcaggattatatttcgttgtaactaaacggtgacgagggtctagaggtgtagcaacaggtgcgcctaaatatacatctccaagccccattacaagataattagcgtcaaatacaattcgtttaacatctccaaggtggtccagcccgtttactcggcgaataaactctaggttgcttggacaccatggtgcatctggacgaacgttttgctgatagcgttcaatagctaattgagttgcaggatcatcccatgaaagtggaagttttacaatacgagacggaacttccatttcttcaagaggaggaagcgcacgatcaatagctgaaatgtgctgacaaagttcaagaatagatatctttgttgcatcaatatgaatttgaagagaacggataccaggcgttaaatctagaaccggtaaatcctcacgcttttggatagcttccattaaagcatgtacttggaagcgaagcagcagatcaagctccatttctccgtattccacaagtatattcgcatcgcctgagcagcggacggaaaatggaaagcgtctattttccgtttcgttaatcagcaacggataatcgcttttgagcggctgtgctactggatttgtaagtacaggaagtgatgcagatgttccgatatgctgcaaaaagtcttcctgagtacatttgagtttttcagcttgttcaaggtcaattaatttaaacgaaattttatctccgggatgaagttgtcctattttccaaaactctgctgaagcggtggtaacagggcaaacaaagccgccaagactcggaccgtctgggccaagtaaaataggcatatctcccgttaagtctaaggtgccgatggcatatgcgttatcatgaatatttgatggatgcaaaccggcttctcctccatcttcacgggtccaaaaaggagaggggcctattaacctcacgcctgttctagaactgttaaaatgaacttcccactttgtatctgttagctgctgtaaatattctggctgtaaaaactcttctgtacaatgagggccgggaattactccgattgaccattctttagacatggctggctgatagggaagggcaagttcattttcaacgtgtgagtagtcagagacacgcagtacatctcccgtacgaagtgctctaccgccgtgccctccgaagcttcctagtgtaaaagtagaagagctgcctaatattttaggcatatcaagtccgccgccaatcagtaaatacgtacgcattccttcggttgcttcactaaatgaaagaatttgtcccggctttgctctaatggtcttatacatagggatttcagcttcgtctaatgtagcatgcatattagcacccgtaatgcaaaaagatagattgtctctaaatttataagagccgcctcggagagtcatttcaatccctggtgcatccggggagtttccgagaagtttatttcctatgcgaaaagcaaaaggatccattggaccgcacggaggaacccctacgttccagtgcccggtgcgtcccggataatcttgaacagtggactgaacgcctccgtctaagacttcgagtgcttgttcgctcggattatatgagttaagcatttgagtatacacgtcgcctgttttgcacgctttttcttctagcagtccctgcaagtattgaagattagtagtaacgccgtataatcttgtttcttttaaagcagcgctcaattttagaagggcttcttctcgtgtttttccatgaacgataattttagccagcataggatcataaagtgatgttacagtaatcccgtctcgtatccacgtttcaactcgagcacttttagagaacattgcttggtcgatttgcccgccgctgggacgaaaatcatttaagcaatcttctgcataaatacgagcttggatactgtgacctgaaggcacaggaagcaaagaaggaaggtttactagctcatcgcatgcttctttaagcatccattctactaaatcaacgtttaacacttcttctgtaacgccgtgctctacttgaaggcgagtatttacttctaaaaaataaaatttctccgcttcggcgtcataaagaaactctaccgttcctgcgcttcgatatccgacttctttagctagtcgcgtagctgcttgcagcatattttcccgtatatatgaagggaagtttggagctgggctttcttcaattactttttgatttcttcgctgaatagagcagtcgcgttctcctaaagccactacttctccaaaagaattcccgaagatttgaacttctacatggcgagctttttgaatgtatttctctaaaaaaacaccgctgtttttaaagtttgtttgtgctaaatggcaaactgagtcaaaagctgcttgaagcgctttttcatcttggcaaacacgcattccaattccgccgccgccagccgtactttttaacataacgggatagccaatctcttcagcagcacatatagcttctgatacatctgtaataagaggtgtaccgggcagcaaaggcacatcggctttttgcgcaatttcccgagctgaatgttttaatccgaatatttccatttgctgaggtgtaggaccaataaatacaattccttcagcctgacagcgacgagcaaattccgcgttttcgcttaaaaaaccgtagcctggatgaatagcttccgcgcctgttttctttgcaatatctagaataaggtcttcgttcaaataactttctttgaccgggccgctgccaattaaaatggcttcatctgtttcatcaacgtgcaggctgtcttgatcagcttctgtataaacagctacagatttcactcctaaatgtcgtaatgttcgctcaattctaacggcaattgctcctcggttcgcaattaatacttttgtaaacatagatgaacactcctttttataatgaatcccaaataactaagcgaataggggtagggttataatcgttgcacgggttgttaagctgagggcagttgctgatcaatacaagtgtaggattgatagcttccatttctacatagtatccaggggcagataccccgtcgttaaacgttaatccgccgcttggggtcacagggacattcataaaaaagtttacgtttggtgctaaatctcttttggtgtagcggctatcatattttgatagctgaagcataaatgtatctcggcagttatgcatcggaagcgtgtcatgtgcataacgtacggtgttgctttgtgccgaacaagctccgcctaaggtgtcgtggcgtccgcacgtgtcagcaacaattttgactagttctttgccagattgagaaagcagcactgtgccagtggataaataaatatttccttgattagcaatcgtagatactgcactgtaatgatcttctaggttttcagcatcaaagaataaagtatccgctgcctgattgccttctacatctattattctaagagtttggcctggtttaagttcgtgcatccagccgtccccagccagtaccgtttcatcataaattgcgttctctatttttctgttgctttccactcgattaaatacagccattatagaagcctccttcatttttaaatccttgataatgttttatttccaagcaataggtcataagaccatgtgttttcaaacgctcgtttattttcaggtctaaaatttaaacagtagtcatctgagcttacaggagccgcttcatctacggttatttcaattggaacagaaggatacgttccgctcgggtctaaagggttaggtgtattagacagtagaaagagcaaattcatttctgttctaagcgtaataaaatctccttttttacaatgagaagaaacaaaattcatattgccttcttcgtcgcagtatacttttgaaaataagttaagattagggactaaatcccgtggtgttaaaccgttacgcaaaagctccattgagaagttttcttcgccattccttctccattcatttcgggattcttgataagtagatacaccgtatttttgatgagttaagctgcgcgtagtgtagcctgaaatggtatcatgccagccggtggtatcagcagtgatgcttgcaaatgctctgccgttgtcactcatcagaacatgtccttttgttaagtgagcagtgtgctgagcttttaaggtatcgggcatgttgtatcgttctgttaaatcataagcgttgtataatagtagggatacatttgcaccggattcttgtgcagtaaacgtcactgattttcctcttccaattcggcctgaccattttccaccagccgggattgtttgcttccagatagaactcataaaataacctccttagaataaaaaaaggataaaagcctgggagagtagtctcccaggcttttatccttccgtgttatacagcgtagcgctatatcgctctctctcggaccagtctttaacatatgttaaacggtgttaaacggaaccctagacagcttttttgttcttaacggctgtaagaacctttatccatttgtggctttcgattaatcgtagtatagtatgagtgaaaatgagttgacaagcagtttgttagaatacctgacataaaaactgatttttcagtttatttttcagggaccgtcacttttgaatgatctctctttacaaaaggagccgacagtcgagattttacaaataaatagagaaatccaacagtaagccaggcgacaccaatcaaaagagtatctttgtttaacagtgtgagcagccatccgataaatgccgctccgatcaaagggaagattaaatagagtattgtttcagtaaacgaccgtttctttaacttaatataaaaatgggcaatgactgatacattcacaaatgtaaaagcggttaaggcaccgaaactgacaaaagtgaccgctgtgtttaaatcaatgaacattcccaaaaacgaaaaagcggtaacaagcaagatattcaccacgggcgttttaaacgttggatgaatatatgaaaataccttttgaggcagtacggattcacggcctaaagcatataaaaagcgagtaacgcttgtgactgaagaaactccttgagtaaaggttgcaataattaataccgtaataaatagactgcttaaaagatttccacccactaattttacaagggtgtaggctgcattatcagggttagtaaacgtgaatcccggataggcaatctgtgtaaaatacgagatagcgatgtacataacagctgcgatgcaaacaataagaaaaatggcttttggaattgtctttttcggttgaatcgtttcttccgccattgttgtaactgcatcaaatcctaaaaagcaaaagcaaatgagcgcagctccagaaaaaatagtcgtaaacggtacatctgaagccaaaaaaggatgaagtgaaaaaagagtagaagaactagcttgacctgttgcaatatctttgatgataaataaacaaaacaaacttataaagagaatctgaactacaacagagatgccacttatacgagctacagatttaataccaacaatattgactaaagctaagataatgttcatgacgatgacccatacgtatacaggaatagaagggaattccgtatgcataaaaataccaaatgttaaaatagcgataataggggagaaaatatagtctaaaagaagtgcccagcctactaaaaagccaaggcgaggatgtatagcttttttcgtatacgtataagcagatcctgctatcggatatgcttttaccattcggctgtagctatatgcggtaaaaaagatagctaaaaaagcgattaaataagcaaggaccatttgccctccagccgcatcgtagactactccataaactgtaaagaaaatcatcggagtcatccaggcaagacccaaaaacacaatttgatacacctttagcgatttacttaacgctggttggttgttcatataaatcccttctttcctctattttatagtagtaaaaaagaaaagcctgggagaatgatgtcattctcccaggcttttatccctccgtgtatacggaaccattccgtacgctctctctcggaccagcctttaacatgtgttaaacggaaccctagatcgcttttttgtcttcaacagagtgaagacttttataggtaatgtaagtagttcgaagtataagcaggattgtaggaagatgcaactactgtgttagatagtttaacaaactttttaaaaaagtaaacttttgtaaaaggcgaactatatataattttattaaaaagattattcgtttatagttgacttacagaaagacctatagtatatttgtagacaagaaaaagctaaatacggttcactcatatatgtttgagaatatggctcagacgtttctaccttatcaccgtaaatgataggactatgagtaaaaagtgaatctaggttcccatttttacgttagtagaaagtttggtccaagcgattcacatattcatttttgaaaagaagtggatatgacaccgaagggataaaagcccaggcgggtaggtttttgctcattgtatttgagagacctgcctttgtttgggctttttcttatgtgtctatttacagtatgagcgagtgatggaagtttcttgtttgtatctgcattgctttctggggagaatagcgatgcaaagcatgaaatcactcactgaagctttatctgtaagccctcatttaaccatgggaagtacattctatctattttctagcattttttctttgatgagcagcgtggggacgctgctcctttttttgttcttgcttttttctctgtaaataaaggtctttaaagagaaggtgatttgcgaaatttggcgaattaatgctttaaacaataaatgatagagaagataaagcggtctatgaaaaatgaagaagttgaaaaattgaggagggaattatgttgcttcacttaattaatgttcgtttgccaattatgcacgaccacgctctttttgaagtgaaaatttcaaatggaatgtatacttctatcgttttacaaaacggttatcttgaaggtgacgagttttttccgctgcatgcggccgtgttaggaaaagaaacgtcacttgatgcacaggggcgtgtgctattaccaggatttgtagatatgcatatgcatttagacaaagctcattcgcttcctcaagtgcccaatatatctggaactcttcaagaagccattaaaaattacagcagcagcctgccggcatttccagaagaagaaattaagcagcgaatgttaaaaactgcattgcaggcattggctaacggtacgactacgattcgaacgcatattgattttgactgcagcatggaagaagatagtttatttcgaagtttacaagcggctgtcgaagtgagagatgaattaagcccgtatatggacgtgcaggttgttccgctattctctaacctagacattgatgatatgcataagatgaataaaattgaacgagcattcgaccttgaaattgatgcgattggaggctgccctcatttagctagaaacccagaaaaagagattgatgctctattttcgctggctcaagcctataataaacctcttgacttacatgtggatgaaagcgatgatccgtctgttgatacaataattaatattgctcatagaacaattgaactaaatatggaaggaaaagtggtagtggggcatctttgctcgcttgcaggaatgactgatgcaaaagtgaaagaaatcttaaaccttttaaaacaggcgaaaattggagttgtcacattacctgcttctaatttatatttacagggaagagaagataaaggaattgtaagacgaggcgtaacgcgtattcgcgacatacaaaaagcagcgattccaattgctactgcatctgataacgtgaacgacccctttcatccgtttggaaaagcagacttgctgcaagtagggttactaactgcctatgctgcacatatgggaagtccggatgatcagcggcagttgctccgaatgattacaagtataccagcccggctgattggaaaagaaaagtatggagtggaagaaggaaacgaagcaaactttgttctattaaatgtgcagtctgtacaggaaatatggactgaacttcccgaaactcgctttgttttcaacaagcatcgctggcttagcgtaaaagagacgcatcagcggctcgctgatacgaacttgactaacctttggcaggaaaatcaaattttaattggttaaatagacataaaaagaagctgtcacattagtgacagcttcttaatcaattacttttgaacgttagcagcttgtggtccacgagctccatcttcgatttcaaatgtaacttcttgaccttcttcaagtgatttgaaaccttcgccttggatagctgagaagtgtacgaatacgtcgtcttgtccttctacttcgatgaatccaaaacctttttctgcattaaaccattttactttaccttgtaccattgtagtacctcctgtgtggaaaatccacgaatatattactatctctgctcaatttcaataagaatcactttaaagaaagtctttctatttgttaacaccgaacaagaaataatatacctagtataacacttttttataaaaaagaaaccttttttcataaaaaagtactctaagataaaaataagttgaaaatatggatatattttgaaatggtaaatgagctatcgttttgtggatttttagcaatcactaaaatcttttatcacgtaaaaaaaatgaatagcgaggttgacaaattgagtaatgtgtaactataatggttacaacaagctgagaagagttagcagtgctataaaaagctcaaatttttttgtgttatatgtaaccgtcatggttacaactaaaataaaaggagagaataaaaatgaaaattggtgttattggagcaacaggaaaagcaggtcaattaattatggaagaagcaaaacagagaggacatgaagtaacagccgttgttcgaaatgcttctaaactaaaaaatcaaacaaacgtaattgaaaaagatatttttgccattacttcaaaagatattgaacagttcgatgctgtggtaaatgcatttaatgcacctcctggaagcgaacagctccacgttgagtctatacaattacttattaaggtatttcaagatgttcaaacgcgactcgcagtagtgggcggagcgggaagtttatttgtagattcagaaaaaacaacgcctttaatgagcacagaaggttttccagcagcttattatccaacggcttcaaacatggggaaaggtttaaaagaacttgaaaagtcgactataaattggacttatttaagcccagcagccttttttgatgcagaaggtgctcgcacgggagcctatcaattaggaaaagatcatgtgatcacaaatagtcaaaatgaaagctatattagctatgctgattacgcgattgctttaatagatgaattagagaatgaaaaccatgtgaatgaacgctttgctgtagtgggtgaaaaagcataagcttacgtttgattcatattgaaaaacagcttgcatttgatgtaagctgtttttttatggaacaaaatagatataaagcgatgaaaaccgatatagattttttattatttcttcgtttttcttttcaaaaacgatacaatacaacatagatgataaaaaggagatgaaaagatgattcgttttggcgtaataggaacaaactggataacagatcgactgttagaatcagctcagtatgtagacgactttcagcttgcagctgtttattctcgaaccattgaaaaagcagaagaatttgcaggtaaatatgatattcctcatatatttactgatttagaggaaatggcagcgagtgctgaaattgatgcagtgtatattgctactccaaatgcttatcatgcggaacaagctatcttatttttgaaaaataacaagcatgtactgtgtgaaaaaccgctcgcagccaatgcagcagaagtaacccgcatgattcaaacagccaaaaatcacaaggtgttactaatggaagcgatgaaatcaacccttcttcctaacttcaaagtgattcaagagaacttacataaaattggtccaattcggaaatacgttgcatcttactgtcagtattcttctcgttatgataaatataaagaaggtatcgtgcttaatgcctttaagcctgagcttgccaacggttcactgatggatttaggtgtatattgtctttatcctctgattacgttgtttggagggcctcataaaataaaggcaacggcgtttatgctagaatctggggtagatggagaagggtcagttgctttcgagtacgaagatcgcgacgcggttatcatgtattctaaaattacaaattcgcatttgccaagtgaaattcaaggagaaaaaggcagtatggttattgacaaaatacataccgctgaaaaggtagaaattcgatacaatgacggacgggtagaagagttaacggtcgatcagccttatcctgctatgtactatgaaataaatgaattcgtagagctgttaaagcaaggaaagatggaatcggacacaaattcttatgagaattcatatttaacaatgcacgtgatggataaagtgcgagagcaaatcggtcttgtatatccaaatgacaataaataacagaggctgggcaaaagtagtttagttgaagaaagatccgaacgagtttgattcttgatggagaatcaagaatcaaactcgttcggatttttttattgatagggtaaaagtaggtttcatgtatgaagttgcttctagctgttgcacggaaatcaacagcggtgtcacccgtcatccatactagatcattttctaatttgttcgtctctaaattagattgagatagttatgtctcattctcttttattgtggttataaagagcataattgagattcgaaatcttgctgcagcacatttcaaaagcaaatatgttgaaacaagggaagttttttagtatcttctatctttattcatccctgcatacataagattaatcaaaggaaagaataaaaagagcagaaaatattcgataatcaatcctagattaaaatgattataaaaaagtattgactataataatagctcgtgtataataaagaatgtaatcaatagtcattactagtttataatgatactaataatcgttatcaaatagagggagtcattgattgcattaaaaataatacatacaagcataagcttgtgaaatacatcgtacaaggagaggttttgacatggcagaacgtatggtaggaaaacaagcaccacgcttcgaaatggaagctgtacttgcaaataaggaatttggaaaagtaagtttagaagaaaatatgaaaaacggtaaatggacagtattgttcttctatccaatggactttacattcgtatgtccaacagaaattacagctctatcagatcgctacgaagagtttgaagatctagatgctgaagttgtaggtgtttctacagatacaattcatactcacttagcttggattaacacagatcgtaaagataatggacttggagatttgaattatccattagctgcagatccaactcacgcagtagcacgtgattacggcgtgttaattgaagaagaaggcgtagcgcttcgcgggttgtttattattaatccagaaggtgaattgcaatacgcagttgtaaaccataacaacatcggccgcagcgtagaagaaacattacgtgtacttcaagcccttcaaactggcggactttgcccagctaactggaaaccaggtcaaaaaacactttaataaatagcggtggagtagaggagaaattcctctactgctgccattaaaatagaaaagatagttttctaactataaaagacagaatattcagttttataaatgatgaggaggattttaaaatgaaattacgtgaacaaatgcctgaattaactggagcaacatcttggattaacgacgaagtaacaaaggaagacttagtaggtgataaagcaacgcttatccacttttggtcagtaagctgccatttatgtaaagaagcaatgcctgaagttaatgatcttcgtgatgagtatgatgatcaattgaatgttgtagcagttcatatgcctcgttcggaagatgacttagatatgggtgttattgaggcaatggcaatgggacacgatattactcagccaatttacgtagacagtgagcataagttaacagacgcttttgaaaataaatatgtaccagcatattatgtatttgataaagaaggtcagcttcgtcatttccaagcgggtggaaatggaatgccgatgcttcgcaaacgtattaaccgcgttttaggcgaagaataatctctacatgaagaagaaataaaaaggccgcgataaaaatattttagccgaagtgaaaaacgaatcactaatcaaaatatttgattagtggttcgtttttttgttgtgatgaacatagattttatctgtttcgttccttctagcagttgattggagggcaaggcgaagactccgcttttcccccaggagtcttgcacggaaatcaacggctgtgtcacaagcggatcagctcatgtatcttatttgttcgtctttaaattggattcatttcgttatgtctcaatctcttttttattttttactgagtcgttttgattattaatgagcaattcatcatattgacataaaaaacctcatatagttaaatttatataagaacaaacgttcgttttcggtgttgttattttactcttttctccctttttaataagtataagaaaaaaaggaggagatttgcacaatgactcagctctattcgcagcaagaaaagcggcacgataaagaatgtacctttcatacatttcttacaaaccacagcgcaactcttcagactcatataatgaatacatttttgacaccagaacgctatgagcgattacaaaaagcggttgttaaacatgatacaaaagaacaaagacttctaaacaaagaatttcatcagttttatagcgaagttagattgcttcattatattaacaagctttgcagacattattccagagatgttatgcgtgtcaaagaaaaagagcgttcttatattcctcttcgcctgcagcagccggctgcgctagatggaaatcgaacagtggaagatatgctaggagtacaggacggggctgtatgggagcatgaatttttaggaaatcaacttgaaaatcgtattcttcatcatgcatttcgccaattaacggccaagcagcagtgtatgctgcacttgattattgttgaacgctggactcataaagaaatcgctgcttatttttctatttctcagcaagcggtttctaatcattatcaacgtgcgctaagcaagttgaaaaaaattatgaaggtgagtgatagatatgtttgatcctcagtggcttcaacttgttggaaacgtaggatttcccgctgtcctttctttttatttattactgcgtgtagaaaacaatataaagcgacttgaagaaaaagtggagaaattaacaactgacttaagaaagaagtgaagaaatggaaactctatatgagcttgtaaataaagtgaaagctggagatgaagaggcgtcaaggcgtttattaaaaaagctggaaccaaaactaaataaagctgttcaaagcttttcgctgcatgagagagaagacgtaaagcaagatttaaagattaaaattctttccgctgttaagacgtttgatttttccaaaacgccaggactttgggaatttttacgccataaataaaaaagagcgctcgttgtatcgacgctctttttttatttttgctgaagttcgactacttaccttacgaaaatacaaaaaatagaaaatggataaatattaaaaaaaggtaaaatattatgaaagccaataaaaagcttgaaatgctgtccatgaaagatggcttaacaggtctgaacaatcgccgatctcttgataaacagctggaaattgagtggaaatacgcacaggaagaaaaagagccgctttcttttctcttatttgatattgattattttaaagcgtataacgatacctatggccatattcaaggagacgaatgcttgaaagaagtagcgaatattgctaaaagcgttgtttttgacgaatcggcttttgttgcaagatacggaggagaagagtttggtatattgcttcctctagctaatcaatatgaagcgataaaaatggcagaagctattagacagcaagtggagcagcgtgcaattatccatcaagcttctgacgtgtttaagggtgtcacaatcagtgttggaataatgacagtcgttccatccgaaaacatacagctgatttcaattgtccatggagcagatcaggctttatatgaagcaaagcgtacgggtcgaaatcgaatttcagtatattctcaccacaaagaagctgactcaaacgtttgagtcagcttttaaaagagatataagcctcttatttaggaggagctttttctttttcatcttcttccataattccttttgtagcgtttttaaactcttttaacgtttttccggcagctttccctaattccggcagtttctttggaccaaaaagcaatagagcgacaaatacaattaaggcaatttctccaaacccaaggttcattgtcatcgtctcctattttttgaaagtgtttacaagtttagtatagcatgaaaagaaaggaagtagtacatcattatccagtgattttaagaccgattacacctgctacaatacaaaaaataaataaaattcgacgcatgtcttttgcttcatgaaagaaaagcatgccaagaactacgcttccagcagctcctactcccgtccatatgccgtaagctgttccgataggtatctcctttaatgctaaggagagaagataaaaacttcctgcaccgaaaaggataaatccaatcgaaggaaacaaccgcttaaacccatctgaaagttttaaaaaaatcacaaatcccacttcgcaaaaaccggcagctattaatgcaatccaagccatgttacgattcctctctttctgtttcttcagtagaaatcaacttcaaaccaacgattccaaagatcattaatcctaaaaataaaatctttccaatatttgctccttcgtctaaaacggtcattccaagtatcgctgtgccagcagctcctataccagtgaatactgcgtaagctgttccgacagcaattttttttaaggcatttgaaaagaaataaaagctgatcacaattgtgacgattgtaatgattgttggagttatttcagtaaatccgtgtgaatattttaagccgattgcccatacaatctcgagcaaaccagcgagaataaggtaaatccaagccattctaattcctccttgcataaaataagccctttttatagggcctatttagcacgtatgccttcccaaaatatcgtccaagcatcgtgaattttttggtcataatactccggttcataataaaagcgctggatgaacagtccgtcggttaaacaataaaagctattgatatacaaatcaatcggacgttcaattatttcgccttcagccattccctgtgtaaaaatagcatgcagaatttgatcagacaatcgttcgcttcttaagaaaatagcttttacttccgactgtaaatgttcaggtggaaacaaaataagacgacggtacatctggccgaaagaatctttttcaatcatcgtgcagaaatctacaataaagcagtgaagctgttctttagcagactttgttttatgctgttcgtatataacagataactttgttaggaataaattcattaaatcatgcacggttagtaaaaataagtcgtctttgttcttaaaatgagcgtacagggaaggtttttttatgcctacttttgatgagatatcagcaagcgatgtttctgtatagcctttttctccaaagagctccattgctgcagctctaattttttctacagttgataattcactcaagaaaagctcctcctcaatctaactaacggtcgttaggtaaaagatatcaaatataaaaaaaagaagcaagggaatcgcttctttttaatgtattttcactaaatgacgctgagttaaaaataaagagaagataaacataagctcaaacgtatttgttacagctgtgcttggtataggaattgacacggcacttcctacaatcatcacggctactccaatcatcatactgctccatcgcgtcttgcgaaataaggaaattcccacaaaaagcaaaataatcgccacaatgagaaccataagagggggagcggatgatcctactaatgtatagcgaacaatgccatattcacgtactacttcgatacgctggctaatcgtctcgaatatttcatagctaattaaggcaaacgtagttagcaaaaaaagaatgccggcaacaggttttttagtccatgtaatcgtcgaatatttcgctacgccatacgcaaagagcaccaaagtaggggtaaataaagcgtgaaaccaaaagcgaagcatgctgagtgaacgtaaagtatccccttcaccgataaatgaaccgatcccaatcattatattatcgtaaattagtccagctattactaaaggaagaaaaagcatgtaaaacggcgaagtgttttttcgcactacatatatgctaaagaaaaacaggacaatatagcaaaaagaaaatagaaaataaagggttgtatcaaccattgttttcctccttttgatgatacttcttctttttatgataacatcatatgccaaaaaagtgagaaatcatgcatttttctaggcaatcttaacggacaaaagctgcctttatcggtagaaagattcagaaaatattgaaataaaaataggaaaagaggccatagtcaagagatttagatttactgaattgattattaaataaaggaaatctataaaataacaacaaaagaactaggaacacatggagtctaaatgcttatataattagaaaaaaatatttaatgtcctttctatttaagtaagttaaatgtaagcagaaaatgataaataaatgtatttttcttacttttatatctatctatcatccttacaagtacggttgttagacaaattcaattggtatatccataaaaaggaattaatgggataaaatattttttatcccgcctttatattacaaaacgttttctaaagttaagaaatttttaattacgtaatatttccgtgtgttaattgtaagagtgatgtataaaatattcctgttgttatggtaaaaaaaggtatcgatgggatttttctaggtaaataaactttagacctattgtgtaaattttaaataaaacgatgagtttttaattctgtaaatagacaatcggaattgtaagaatatataacatttgagctattgaccactaatgagcgcagatgatagttttagagctgttgaaattggtactcgagtccatttttcaaagcaggtgttttagcagcatgctagcgctgttaattgattagctcccatacatatataaagggagtgaaactatgaaatcgtatatctatcattatgaatcaaaagcattcataacgtatccaacaggagaagtttggaaggagaagaatgaaacatgatcttaattatcctatgctgcctatttttagtagggtatggcgtttgggagtatcgcagacatttacgcaagctgcattcaattcctgtacgagtgaatgttaatggtattcgcggaaaatccaccgttacacgattgattacaggtattgtaaaagaagcaggttacaaaacagtaggaaaaacgacaggaacacaagcgcgtatgatctactggcatacaagtgaagaagaaccaattattcgtcgtaaagaaggtccgaacattggagaacagcgacgagtagtaaatgaagttgccgatattggcgcggaagctcttatttgtgaatgtatggctgtacagcctgattatcaaatcacattccaaaatcagctgattcaagccaaggtaggcgttattgtaaacgtactagaagatcacatggatgtaatgggtccaactctagatgaagttgctcaagcgttcactgctactattccttacgatggccaccttgttacaattgaaggtccatatttggaatactataaaaaaatagccgcagagcgcaatacaaaagttattgtagctgacaatgataaagtatctgaagcgtatttacgtgaatttgattatatggttttccctgataatgcttccatcggtttagcagtagcagaagcacttggtatcgatgctgaaacagcgatgagaggaatgttaaatgctcagcctgacccaggagctatgagaattacaacgtttggcgatgaaaaaaatccagcctttttagtgaatgggtttgctgccaacgacgcttcttccacgcttcgtatttgggaacgtgtagattcaatgaactatagtgaaaagcttcctattgtcattatgaactgccgtccggaccgtgtagatcgcacggagcaatttgctgaagatgtaatgccatacattgaagcggacgtaatgattgcaattggtcagacgacctcaccaatcgctgcagcatatcaaagaggcgaattgccaacaaaagaattctgggatatggaaggcgcttctacagaagaaattttagagcgcatgaagccttatttaaaagatcgtatcgtatacggtgtcggaaatatccacggttcagccgagccgcttgttgaagctattattgaaatgaaaaagatgagaaaagcagtttaatctaggaggccatttcatgttcggatcagatttatatatcgcccttgtgttaggggttacactaagcttaatttttacagaaaaaacgggcgtattgccagccggtcttatcgtaccggggtatttagctcttgtatttgatcagccaattaccattttaatgattttcttaattagtattttaacgtatgttatcgtcgtatacggaatctcaaaagtagttattttatatggacgtcgcaaatttacagcgatgttaattacgggtattgtgattaaagttgcatttgattatttcttcccgatcttgccgtttgaagtgtttgaattacgcggaattggtatcattgtaccgggcttaattgcaaatacaatgcaaaagcaaggtcttcctttaacagttggaacaacggttttattaagtggtgtaacatttggaattatgcaagtttattatttattttaatacacaaacaaaccgcagctggtaaaggaaggtgaaagcgttgaaagagaaaaaattaaactttcaagaaaaagtattgatgtttataaagaaaacaaagcctacaacgggcaagcaagctcttatcttaacgccaattttaatcgtaattttagctctttcaggatggatggagcgttcggatgctcttgaaaaccctgagacggctaatccagaggccaataatgatttaacgatgactatggtcggagacattatgatgggtcgccatgtaagagaagtaactgaacgctacggagaagattttgtattccgcaacgtggagccgttctttaaaaattcggattacgtaagcggaaactacgaaacaccgattttaacaaatgacgtagattcatataaagcaatggaaaaaggtattcatttatatagtaagcctgctgatctagcgactgttaaaaatgcaggtttcgacgtattaaacttagcgaacaaccattcaatggattacagtgcaaaagggttagaagatacgatctctacttttgaagcaaacaaattagattttgttggtgctggccgtaactctgaagaagcaaagcatatttcgtataaagatgctgacggtattcgcattgcaaccgtaggttttacggatgtacattcagacggaatgtcggctggaaaaaataacccgggtattttaaaagcagatccggatcttattttcagcacgattcagcaagcgaaagcaaatgctgatttagttgtagtaaatgcccactggggtgaagaatatgatgcacagccaagtcctcgtcaagaaggactagcaaaagcgatggtagacgctggtgcggacattatcattggtcaccacccgcacgttctacagtcatatgacgtatataaaggttcggttatcttctatagcttaggaaactttatttttgaccaagggtggtcaagtacaaaaaatacagcgatggttcagtatcatttaaacaagcagggccaagctaaaattgatgttattccaatggttattaaagcaggtacaccaactccaacagataacccttggcgcatgaagcgtatttataacgatttaaacaagttttcttcaaaccctgaactgttagaaaaagaacgaaacaagtttgaattaaacttagatcattctcgcattataaaacatgcagaggagcgcaaaaagaacgaagcgcaagctaactaatagcccgtcatacacagaggaggtaaaagatgataaataaacgtaatacgattattgtttccattgtcatcttttcactcatagtaggtgtatgtgtttatcaatttatgtttccaaaacaagaatatgcagtaagtacttcagatcctcgcgccacaaaagtaggtatggaaattcttaaacaaggcggtacagcagttgacgcagctattgccatttcctacacgcttggtgttgtggaaccgtacggatcaggacttgggggaggcggcggaatgctgattgatccagcagatgcctctccaacatttattgactaccgagaaattgcacctaagaatgataaagaagatgagattggcgtaccagggttcgttgctggtatggattatattcagcaccactacggatctatgtcgatgagcaaactaatcgacccggccattaactatgctgagaatgggtataaagtggacaaagatttgcacgataggctggtttcatacaaaggtaatgtgaatgaagatgaaattcctagcttttatccagataaggacgctatcaacacaggtgaaattgtgaaacagcatgaattagcgaacacgctgcaaaagattaaggaagaagggccaaatgctttttatagagggaaaattgcagacgatattacagaagaaacaaaagtaagtcacaaagacttgcgaaagtatgcgcctgttgaacggaaacctctatcgacgaattataaaggtcatcaaattatttcagcacctcctccttttgctggtgctacgcttattcaaatgttaaaaatgacggatcaagaagatatttggaagctgaaggaatcgcatcctagtctttattatcattttcttggtcaaatttcaaaagtagcttatcaagaccgcttgaaaaaaattgctgatcccgcttttataaaagaaacgccaaatgattggatcgacgaccattacgtgcatttacttcgtaataaattaaataatactgaaacagatcataccaaagtaagcgacgtcgaagaacatgaaagtaccactcattttgttgtcatggacggtgaaggaaccgttgtatcaacaacgaatacgctgagtaatttcttcggcagcggtgaatatgtagatgggttctttttaaataatacgctcaatacgtttggggaaggaattaataagcgtcaacctggcaagcgtccaagaacatttacagcccctaccattattcgtgaaggtgatgaatgggtaatgtccattggcacaccgggaggaaatcgcattcctcaagtgttaacgcaagtaattggggattattttgaagacaaagattctattaaaaatgcagtagaaaacaagcgtgtcatttttgattctcataagttttattcagaagccaagcttaaacagtcaacgaaggatggtttaaaaacgtacggctatgacttaaaaaacaatgataacgcgatgttttacggaggcgttcaagctcttgtgaaagacttaaagaaaaataagattcaaggtgacgctgatccgcgccgccacggtttatgggaaaaaagtacagactaacttaattggaggaatagaaaatgatcgcaaaacgtatcgtagggattgtaggaccaattgctattgtagcaggagtagtagcaggacttggagctttgaaacatccggctactctttcaacagatgaacagcaaaaaattgaaaataacgtaaaaatgattgaacaaacaaaatcagctgctgcagatgcagtaaatgatgctgcggcagcagctggaaaataaataacaaaaaggcatcgtcctagacgatgtcttttttgtgttcaatgtaatgtatggataaaaatgaaagcgcttcacaaaatatacagatgagtaaaaatggagggtaatatgtgaataaaaaattactgttgtttaatattattgcttttttattattaatttgcgttatagccgctttttttatgactcaatcgagtacagatcttagtcctgaaaagctgcttaaaaaaaataatgatcattcttatggtgtgagctcttctaattctctggcagcaaatgtagggatggacgtattaaaagaaggcgggaatgcagtagatgcggccattgctatttcgtatgcccttaacgtagtcgaaccttttggatctggaattggcggaggtggaggtatgctgattgccaaaaaagatcagcctgctacttttatcgattaccgggaaaccgctccaacttctatgagtggtaaaaacggggtgccgggatttgtcgctggtatggaatatattcagcagaagtatggtacaaaatcaatgagtgatttgattcagccggctgttgaatacgctgaaaaagggtttgaagtagactctcttttatcgtctcgattgtattactctagaggaaggatggatgtagacgatctatctgctttttatccaaagggagaagcaatcgaagaaggagaaactctgtcgcagcccgtgttagctaaaacactaatcaagattcagcgagaaggcgcgtctgcattttataaaggagatgtggcacaagatcttgctgatgcaacgcctatttctaaaaaagacttatcttcctatcaagtgacagaaaccaagcctgtcgtttcaacttacaatggaacggaagtgatttcagcgcctccgcctttttccggaattacactgattcaaatgttaaaaatgacagagaaagaaaatcttaaaacaatgcctgacaaagaatattacgaaacgatgaacagaattaaaaaggcagcttactccgaccggttaaaacaaatcggagatccagactttcataatcaaaactcaagtgaattagtcagtgatgattatataacaaacttggtcgatcacccgacacgttcttcaggtgaaggcgatgaagaacacgaaagtacaacacattttgtggttattgattcagaaggaaccgtcgtatctacaactaatacgttgagtaacttctttggtacaggcgaacaagttgacggcttttttcttaataacaatgctgatacgtttggaagcaaagaaccgaataatcgcgagccgggaaaaagagcaagaacttttacggctccaactattataagagaaaaaagcgagtgggcgatgggaataggttctccgggcggaacgcggattcctcaaattttaactcaggtactttctaaaaactttgaaggaaatgaatcgcttcaaaaagctgtaaacgaaccgcgctttatttttgacgattcgactatttatgtagagcccgatttaaataccaaaaatattccttctgcgtttcgaatagaaacaaaggaaagcgacgtcttttatggaggtattcaagcgttaaccattaattttcaagataaacaaatggaaggagccggagaccctagaagaaatggagtttggaaaacaggagattaacgaagtaaagatcccttctcatatgcttaggcatagtgagaaggcgtttgaaaatatcgaatggaatgaaaatctttgtcgctggaatgaaaatgtacgtaaatgggggaacgatctaaagcagggtgagcgttgaaaaacgtggcatcaccgtagcgcaatgcttttagcaagtaaggcatttcctgtttgaaaatagcgtgccgtatggcttgaacggacttttccgtttgttcattgccaataaatacgtatacatacagcgtatcaacaccgtctttgtggagccattcggcaaaaagctcatttcgctgttcatttaattgatcaacagcaaacttttcgtcgatccaaagaaataaatcgtctgtttgttcagaatgtgtgagcgtatagcgtcgcccaataaaaggaaaggtgggcgtgcttccttgccggtatgtgacgctaaattgctgaggattaaaagcagacaaacggcatcttcctttcacgcttttaagtagtttatgcataaaaaagagaaatttcacacattcgtcaagaattttaagctgtttttcttacatgcatacttatgaaaaagttgttacactgaagaaaagaaatagtgggtgataaaagatggagccgctgtatattgtcttatcaatttttttagcagcgatgctatcgtatgatattgctaaatttgttcgaggggaccggccagattggaaagagggtctcgtgacgggccttgtgttcgtgggctttttagcagccatgcaaatggcttttcacattgtatagcgacgaaagaagctgggacaaacgtattttagttgaaggaagatccgaacgatgaatcgttcggatctttttttgttaggatgaacggagatttcatctatgtagtggcttttagctgttgattggagggcaaggcgaagactcctgcgggaaaagcggaataggtgagacctcgcaggagcgtcagcggcgaggaggctcaccggccgtccgcggaaagcgaagtcttgtacggaaatcaacagcgttgtaacaagcgatctacacccgatcatttatcctatttatttgtttttcgattgaattaatgtagatatgtctcaatcccttttttaaagatatgccggataagtttagtccggcaatactaaaaagcttggatatcgaataagctgttgtatactgcatttttgataaaggggctttttacttgtatcgaaaaaaaacactgcttttgaagcgaagtttaggagtagctgtgtttctttctgttattgcgctgggagtttggatgtttcaatttacattcttttctccaagtcatcaagccaaatctgccgtaaaagaattttatacgctagaacaggaaggaaacttttcggaatcatgggacctttttcattcatccatgaaaaagaaatggacaaaaggtgcatacatacaagatcgagcacacgtatttctcaatcatttcggggtagacacctttacgtattccattgaagatgttgaaaaaagaaagagctggaagatggaaaatgatcgtaaagcgttttctgttgtttacgaaatgaccgttatccaaacgtataaagggaaatatggaaactttgatttggtgcagaaagtgtatgctgttcgtgaaaaaggagaatggaaagtcgtgtgggattataaacagtaggagagcctgctgtttttttattttcataagaaatgagcatacctcagctgttaataggcctcttttttaacagaaaaaacgttatgtttttttgcgagtgggtaaaatgaaagaaggaggcgaacacagatgaaatttaaaacgattttatttgatgcatatggaacgctgtttgatgtacataccgttattgaaacgtgtgataagctgtatccggagcggggagaaagtattagccatttatggcgtttgaagcaaattgaatatgcaatgcaatatcagctgatgggacgatacgttgacttttatacattaacaaatcaatccctaaaatatgcagcagaagcaaatgatattgatttaacggaacatgaagaaaaaatgctgatgagtgcttacatgaagctgaatgtctacgatgaggtcaaagaggtgctcgcctatttaaaagaaaaaggatatcgtctggctatttttacgaatggtcctaagcacatgattgatccgcttgtttcttatcacaacatgaatcatttatttgaagacgttatttccgtagacgaaatcaaacagtacaagcctacgatggcaagctatcactatgcaaaaaataaaatgaacgcaaaaagagaagaagtattatttttgtcatcgaatacatgggatattgccggtgctaaaaactacgggttcgcaacggcttgggtcaaccgaaaaggaaatgtagctgaacataaagaattgcagccaaacgtaatcattaaaagcttaaatcagcttattaaataaaaaaagaacgagcattaagctcgttcttttttatttattgctaaatgtatcttttgtttcgcctactgctttttgagcatttccttttgttttctcagcttttccttcacgctgaaggtcgcggttattcgttgcatttccgacttgatcttttacttcacctttagcttttgatacatttcctttaactttatctcctaaacctttactcattttaatcttcctttctattagtgattaagtagtgttacttgtctgttccaccgttagaaagaaattaaacatattttctgattttgacctaaacagaagctaagcctgcgatattaaaaagtaatgtgtaggcactatcatcattatcgttcggaggttttaagttcccattcatcataaatctgagattcataaggccatgacaataagcttaaagattccactgcttttagaacaagaggagaagcattatcgatgttaagatcctgcggtgcgatccacaatgcttccaaagaatcttgtccttcaaactggaccgggttggaaagaagctcaccgctggcaatgtctacgtgataaaaaacggcaatgtgatgtacgtgggtaaattctttccacttacagggatactgaaaatccgttgtacccgcttgagaaataatagtaatttcaaagcccgtttcttcactaaattctcttttcatcgcatctgttaatgtttcaccgtgttctagctgtccgcctggcaaatcaaagcgatgaatatacggccctctattttttcttataacaagcagcttgtcatctcgcatacaaattccatatacgccaaaggcgcgatcatagtttggttccatctttttttcactactttctataacagaatggcttgataaagcatcatttgatttctttatcctaccatacattttgctatagaaccttttttaatgagatgcttttacagtaagcgtgcgggaaacagcactttcgttatgcaaacggtcaacagaggttacaacatatgtgtacgtttgatttttgagtgcgctttgatctacaaacaattgtgtttctcctgttttccgaacggttgtcagcaagttttctgcgttattaatgtcgcctcgtatattgccttggaagcgataaatggcataatatgcggaatcattctgctgatgatctcgaatttcaaacgctgcttcttttgtatgagggcccgcgctttttaattttggtgcttttggggccgtatcatcaagccaaggcattgacggaataagagcaggatgtttataaatatcgttttgcagcttgtcttttattcctagtgggtttcggttcaaatctttcaggctaaaatgcatgctcccgtgtacttctggaaattggtgattcagagcaatttgtcttgaatactcatcgggatcagaccatgcttccaccgcgttgttattaattttgtaagcagcttgtccaatataaaggtgaactggctttccacgaacttcatctctccaccagttgagcagcgtatcgtaagcagcgggttcaaatccgatattccaataaatttgcggagtgatgtaatcaacgtatccattttgaatccacgtacgcgtatcggcatacaaatcatcgtagtttgtttgtccagcagtagtctcagagccagttggatcattagcgatgtttctccacacgccgaacggactgataccaaacttcacgtatgattttgtttttttaatagacgtatttaaatctcgaacaagctgattaacattgtctcgtcgccagtcttcaatgttggaaaacgtttgagcaccgtaggtttcatatgttttttgatctgggaacgtttgccctgcaattttgtaagggtaaaagtagtcgtccatatgaacagcatcaatatcatagtttcttacgacttcgagcacttcttcaataataaagttttttacttctggaatacctgggttatagtagagttgttttccgtaggagacgacccaatcaggatgttgtttggcaggatgattatcggcaagtttgtttaaatcagtatgattcatggtaatgcgataagggttaaaccatgcgtggaattctaagttgcgcttgtgtgcttcctccaccataaaagctagaggatcgtagccgggatcttttccttgtgtacccgttaaatattctgaccacgggccatatttcgacggataaaaggaatcagcggtaggtttaatttgaaccaccacagcattcatccccatcttttttacttcatctagcaaataagtaaactcttttttctgctgctcaaccggaagaccaggctgagaaggccagtcaatattgtatacgcttgcaatccaagcggcccgaagctcccgtttttgatacgtggtaggtacatctgctttagcaggtaacgcgctcgaacaaaacagcagtaaaaacaagatgcctcctatacattttttaatatccatgttcgttcctccttcttttttggttgagataaaatttctttcataatatagcatgtggtcgttatattcacaatagattttaataaaatattctgaaaaataaaataaagttttaaaaatatcagaaaaatattgaaattaaacttcagaaaaaatataataatggtaatttaaagaatattttagaaatacgttacttaacgatggaggaattcatgcgccaattttccgtacttactttaatcgatgcacaaatgaatcattacagtcctgctgagggaagagtagctgattacgtgttagaaaatcctacgaccacgttgaacttaacgaccaaacagctagctaagcagtgtcagtgcagcgaagctacgattattcgtttttgtcagcgtgtaggaatcaatagttttaaagaattaaagattgaattagcaaaagatgcccataaggtgaataacgagcagctgccgaatcttccggttaattttgaagacgagaccgaagccgtgcttgaaaaagtcatgagtaaaagtatgagcgcacttatgaacacaagtcgtttagtgagctcttctgcaattgatgcagccgcggaagctattcatggagcgaagcgagtgtttttatacggagcagggggatcatctgtagttgcgctagatgctcagtataaactgcttcgaattgatatttcagcgctgttttcattagacagtcatgttcaaatggtgatggctgcgaacatgacaaaagatgatgtgctgtttgtagtatcgacttctggtcaaacaaaagaagtggtggaactgatgcaaatagccaaagataaaggagcagcggttattttgctaacgcagcacggctcatcgccagcttctagattagctgatattctgctgactatttcagtagaagaacagcatattcgaattggaacgatgagcgctcgtattgctcagttagccgttgtagatgcgatgtttatacggttatgtattcaaaaaggcaatcaagtgtttgaacgcataatcgatacacataatgtaattcaaaaaataaagaggtagggggaaacgagaaaatgaaggtattgtttgtatgttctggaggaatgtcaagttcgattgtggtaaaagcattaaaaacggaagcacaaaagcacggaacggatatggaagtgctggcaattgggacaaatgaagtggcagaggaaattcaaaaaggctgggatgttgtaatggttgcaccgcagattcgccaccggtttaacgcagtgaaagcggaagcggataaagcctctgttccgtgcgggccgattccgccgcaggcttatacgccgcttggaggtccgacgctttataaaacggttcaacagctcgttagctgaggaaagcaggtgtattcctgctttttaaataaataaggggtttattacacaaggggagaatatagagggggaaagggtatatgagcaaatttgtgtcatttttagagaacaatttatcaggacctatggccaggttatcggaacagcggcatcttcaagccattcgcgatggtgttatttccgctttgccgttcattatcatcggaagttttttcttaattttagcatttccgcctgtgccgcaagatagcacaattgcaaaatgggcagctgataacagcgccaatattttaataccgtatcgcgtaacgatgtttattatgtctttatatatagcctttgggatagggtataacttgtccaaaagctataatctcgatccgctgtcaggagcgcaaattgcagtagctgcactacttcttacggtgactccaaagctgattgaagaagaaggatttatgcttccaatgacaaaccttggaggtcacggtttgtttgtaacgatgattgtatcgattttatcggtcgaaattctcaggttttgtaaagcaaaaaatgtcaccataaaaatgccggaacaagtgccgccttcggtatcgaggtcttttgaagcactaattccggttgcgattgttgttgtacttatgacgattattaccattgttttaggtatcgatcttcaccatttagttgataaactagttgctccgcttgtggaagctggagatagtttagcaggagtattaataccggttttcttaattacgtttttctggtcatttggtattcacggcgtctctgttgttgggacagtggcacggcctgtatgggaagtgtatttagccaaaaatgctgaagcggtagcagacggagcttccacacttccgtatattgcacctgaaacgttctttcagtggtttgtttggatcggaggatctggagcgacgctgggccttgctttagcaatgctgtttttctcaaaatccaaatattcgaaagcgctttctaggacatcttttattccggcggtttttaatattaacgaaccaattattttcggtttgccaattgtcttaaatcctattttaattatcccatttatcattatcccgattattacaacgatcatttcatacgcagcaacggcgacaggtcttattacgccaacctacgtaatggttccttggacgctcccggcgccgatcggagcttatctatcgaccggaggagactggcgggcggttgtgctagtcgttatcaatattgctatttctgttgtcatttatcttccgttctttaaaatgtacgaccgaaagatggtcgaaatggaaaaaagcgatgaagcaacggttgcaccatctgatagttcagttcaaatgtaaagaaagagaagccaacttgtttggcttctatctctttagtaggagttgagggtcaatgtttgtgcggtttcgatataaaactgtgtttttatttctgctaaccatggttctttgcaacgttatttttacacctctgctgcagtatgctggtttaccagcgcagcatagtttatttgccattacaagcctatcagcagcactgcttacaacatttatttccattcggctttcaaacgcaactttatctaaaaccgccgtttgtatacgctttgttttgcttggaatagggtgcacagccgttacatatttagccgttttttaacaaggaggggcaaaaaatgaaagtagtgacaattgggggaggatcaagctacacaccggaattggtcgaagggtttattaaacgatatgatgagcttccaattcgagagctatggcttgtagatgttgaagaaggaaaagagaaacttgaaattgtaggagcacttgcgaaaagaatggtcaaaaaagcaggtgttgatatgaaaattcatttaacgcttgatcgacaaaaggcgttgataaatgctgattttgtaacgacacagcttagagtaggtcagcttgatgcgcgtattcaagatgaacgcatccctcttaagtacggaatgattggtcaagagacaaacggggcgggaggattatttaagggcttacgaacgataccggttttgttgaaaattgccgaggaaatacacgaagtttgtccaaacgcctggcttattaattttacaaatcctgcaggtatggtaacggaggcgctgcttcgctacggagagcattctaaagtagtaggagtttgtaacctgcctgtacatatgacaacctccatcgcgggcttgcttcaagtagaaaaagaagatgttcacattgaatttgcagggttaaaccacttggtatatggactgcatgtgtatgcaaaaggaaaggaagtaacgcaagaagtcattcggcgattaagtgatccaaactctcaagtaacaatgagaaacatagctcctattccatggcaaccggactttttggaagctcttggcgtgattttatgtccgtatcaccgctactactacaaaacaaaagaaatattagcagaagagcttctggcttttcagtcaggtacaacacgcgctgaagtggtaaaagcattagaagccgagctttttgaactctataaaaatccaaatctagaaatgaagcctccgcagctggaaaaacgagggggcgcttattacagcgatgccgcatgtaatttaatttcatccatttataacgataaaggcgatattcaaacattaaatgtaaaaaacaatggagctatttcctcgctcccaaacgaatctgcggttgaagtaaactgtgtagtaacaaagcaagggccagtaccgctcgctttcggtgaacttccggtagaagttaatggacttgtgcagcaaattaaatcgtttgaacgaataggagcagaagctgcggttacaggatcttatgaaaaagcactggttgcgctcagcattaatccgcttgttccaagtgacgagctggctaagtcggtcttagatgaactgcttcaagctcatcgcaagtatttacctgctttttttaaggaagtgaacgcgtagtatgtatgctgttggacttatgtcaggaacgtcactcgacggaattgatgcagctcttgttcaaattgaaggaagcggctatgaaagtaaagttaagcttcttcattttattaccgtgccgttttcacctcagttaaaaaaggaaattgagcaggcgctttcttttgaacattcaaatgtacagctgatctgcagcttaaattttaaacttggctatgcatttgcggatgcagtgaaaaaagtgtgccaagaagcccgcttttctcttgaacaaatagatgttattggatcgcatggtcaaaccatttaccatcagccttatgcttcgggaagtacagtgatgtctacactccaaattggagagccggctgttattgcctatgaaaccaaaacgaaggtagtagcaaacttcagggtgatggacatggcagcaggggggcaaggtgctccgttagttcctcacacggaacggattttgtacagccacgatgagcgtacaaggctgcttcaaaacgttggaggtattggaaatgtaacgttgattccgccaaaaaaatctcctatacccgtagtagcttttgatacagggccgggaaatatgatgatagacgaagcgtgtcagcagctttttaatgtttcatttgatgaaaatgggcgtttagcagctgaaggaaagattatttcagagcttttaggagactgtatgaatcatgattacatgaagctttctcctcccaaatcgacgggaagagaactgttcggtacacagtacacaaagagactgctagagaattatagtaaacataaaaaggaagatctgctagctacgattactatgttcacggcatcatccattgtacatcactatgaaacatttatttttcctgcctattctattgacgaagtgattattggaggaggcggaagttataataatacgctgatgaatatgattaaagcgcagatcgggaaacgctgcagcgtgtatacacaagaagaaataggaatgtcttcagaagcaaaagaagccgtagcttttgcggtgctcgcaaatgaaacactttcaggttatccaagcaatgtaccaagcgcaaccggcgccttgtctcctgtaatattaggaaacattacgcctgtaccactataaaaaaggggatggaagaaatgacagaagcagcaaatatagaaaatgaaatttttgaacttattgcatacggaggaaatgccaggtcacttgcatatgaagcgttagaagcagctgaagattatgactttaatagagctgacgaacttttaaagcagtctcaagaagagctcagtcatgctcataaaacgcaaactgcgcttattcaacgtgaattgaacggaaaaacaattgaaaagtcgctgcttttaattcacgcacaagatcatttaatgacggctatttcagagcaaaaattaattgaacatatgattaagcttattaaaaaatttaaaaaagaaggcgaaaatcaatgaaaaagctaggtattgcgatttacccggaacattcgactgtcgaaaaagataaagcgtatatagcacttgcgcatcaatacggatttacccgcatttttacgtgcttgctttctgttgaaggcgatcagaaaaaagtaatggcaaattttaaagaaatcattgagtttgccaatgagctagagatggaagtagtagtggacatcgctcctcgcgtatttggagcgcttggcatttcttatgatgacttatcttttttttacgaattaggggcttatgctattcgtcttgatctagggtatacgggaaatgaagagtccattatgacctttaatccatacggcttaaaaattgaaattaacatgagtaatgcgacgaagtatgtggataatattttaagttacagaccgaatcgaaagcagctgctcgggtcgcacaacttctatcctcatcgatatgcgggattgtcgtatgatcactttttgaagtgttcagcattgtttaaagaacataaccttgaaacagcagccttcattaattcaccaagcgctacttttggaccgtggcctgttactgaagggctttgtacgcttgaaatgcatcgcacgcttccgatcgacgtgcaggctaagcatctttttaaaacgggattaattgattgtgcaatcattgcgaatgcgtatgcatcagaagaagagatgaaggcgctgcgtgatgttgttcagcaagagcgctttacttttaacgtgaccctgtatgatacgattaccgagcttgagaaaaaaattgtgctggaagagtttcatttttaccgcggagacgtatctgattatttaattcgctctacgcaaagccgagtaaaatataaaaaagaagaattcaagcctacgcatactccttccattcgaagaggcgatattttaatagaaaatgaactctatggacaatacaaaggagagctgcaaattgcgctgttagacatggagaactcaggtaaaacaaacgtagtaggacgcattgcagaagaggaaatttttttactaaatgaactgcagccatgggacaaatttgctttttgcgagcggtgataaaatggactatattattggtatcgacggcgggggaacaaaaacagaagccgttgcttacagcttaaatggtcaagagctcgctgcttcaaaaagcggctatggcaatttgctcattaattacaatacggctattactcatattgatgaatgtattacggcgtgcaaagctgcgcttgctgatcatacatgtaaaggcatttcactggggcttgctggaagtaaagcattatctaaagaagaaataaaaagatatttttatgatcgttatcaggtagaagtaggtttatatgatgacgccatgattgcacatgaagcactactgcatggaaaagacgggattttaactatcgcaggtactggagccgtcagcattgggaaaaaagacggagtgtacgaatacggaggagggtggggacaccttcttggagatgaaggaagcggatattggattggtcttcaagcactgatattgctgacgaaagagcatgatcaaagccgtccttacagcagccttagtcagacaatcttgcaacatgtaaaagcagataccatacacgatataaaaaagtttgtctattcatctcctaaatcagaagttgcttcactcactccgcttgttgtaaatcaagcgagaaaccataaacaagaagcaagtgacattcttcaacaggctggaaagaaccttgcaaacatgactcttcatttatataagaaacagcggtttgaagggagctgcttgctgtcatgcaaaggcagcattttaacggaagttccagaagtgtttgatgtttataaaaaagcatgtgaaaaagaaataaagcatatccagtgggcaacacagcgagtatcatctgctaaaggagcttatcagctgttcatgaaagagtataaatagagaaaaaatgatggtggaaaaggcaggggatcacagtgaacttaaatcatatcttaacagaaaaacgcaatccgcaaaccttaaacattgatgaattatcaagtctggaaattgtaaaaaaaattaatgaagaagatcatcaagtgcctcaggcgatcaataaagtgctgcctgttattgctctgttagtagatgaaattgtcagtgcttttaaacaaggcggacgtcttatttatatcggagcaggtacaagcgggcggctaggtgtattagatgcatctgaaggtgtaccaacattcggtacacctgccgaacaagtaattgggatcatagccgggggagacaaagcgcttcgtcatgcgttagaaggagcagaagataataagaaacaagcgatagaagatttgaaagcgattaatttatcaaataaagatattcttgtaggtatagctgcaagcggaagaactccttatacactctcagcgcttgcgtatgcaaacagcctgggggcagtaacgggctgtgttgtaaattctcctcaatcacctatggaacaagaagcaaaatatgcaatagtagcagaatcagggccggaagttgtcacaggttcaacaagaatgaaagccggaactgctcaaaagcttgttcttaatatgctgacgaccgcttctatgattcaaattggtaaagtctacagcaatctaatggtagacgtacagccgactaatgataaacttgtacagcgtgctaaaaatattattgcggaactaacaggcgtctcaccagaggaggcagcggaaagtttacaaacatacaaaacgccaaaagccgccattcttgcgcttcttacttctacagaaggtgatgaggtgcatcggctgcttgataaacatgacggacatttaaaaaaagccatcggagaagcaatggaacagccgactaaagattaagtcttaaaagaagtgcatacggcacttctttttttgttgagtacattttttgcacaatgtatgtgggtgaattcggtctaatcattttgtaagacccgtagtatagtaaaagcataaagcatagtaagtatttcaatttgtgcacgaattggactgaaggtgattcatttgttagacaaacgcagtacggccgtattgcaagttttacttcaagccgcaacatttatatcagtacaagagttaatgaagcagtttcaagtgtcaaggcgtactatctattatgatattgagaaaattaacgattggctgtgtcaacaagaattagagtttgttcagtacacatatgggaaaggcttttttctaaacgatcaagtaaaggaccaagttgctaaacaaatttctcatgttatgccatctgcttacttatcagttgaggaccggcaaatatacgttgctttgatgtgtatacttcgaggcgggaaaatcggaactcagcagctcatggatgaaacagaagttagtcgcaatactgtcttacaagatattaaagacttaaaaaacaagtgggtaaagaaaggcatatctttgacatatagctataaagatgggtacgaagtaaaaggatctgaaagcgacattcgaaatttgctttatatacacatcacagaattattaagtcaacatcaagaagagttgttgaaaagggtcatgaaagcagattacgaatattcaatgatttatcactggcttgtagagtgtgaagataaactgggaatggcgtttacagacaagatgctgacgcaattagcctatatgctcacgtgctgtattcagcgtattggaggcaagcgctatgtagacgccctgattactagaaaagatgaattagaaaaaaccaggcagtacaaagcgctccaagaaattgaaagcgttttaggatttgattttccacctcacgaaaaacattatctggccacagttttactaagtgcaaaagtaaatgtagtaaatcaagcagatagtgatgattggatgagaagcattgtaaaagaaatggtatcacggtttcaagcatatgcttgtgtggtatttgaagatcgaaatcgtcttgaacaaaatttatatattcatttgaagacggcttattacaggcttctctataatattcacctccctaaccctatgctttcggctattcaaacaaagtatcaggatatagtggaactgacaaaaaaagcgttgcttcctttggaaaacagccttcaaacacgtattaatgaagacgaaatttcttattttgctcttcatttcggaggatggatgaaaaaacaagagggaaggcaaaaacaaaagcgtattgttattgtttgtgccaatggaattggaacgtcccgtatgcttcagtatcagcttgaacaactgttaacagatgctgaattgatagggccaatgacggtaagagattatgagcagtttaaagaaacctatgatttagttattacaactacgccattaaaaaagcgaatgaatgtgatgcttgtgaatcctattttaacggatgatgaaaagcagcggttaatcgacttagttgaaccagcttcttctcagctaaccactcaagccatcatgggtattattaagcagcatgcaaatattcaggatgaaccagctctgttagctaatttaaaactagtgatacagcaatctaaaaaaatggtaagagaggataaaaagccaatgttgcatgaagtattgcaagagccattcttgcagcttacagattcagcagatgattggaaatcagctgttaggctggctgccaagcctttgttgaactatgaatatattgaaccttcttatgtagaagcaatgatcaaaagtgtagaacagttaggcccttatattgttattgcgccaaaagtggcgctccctcatgcaaggccggaacacggggtaaatcgtgtgggtatgagcatgcttcgtttaaaggagccggtctatttttctactgaaaaacagcacggagcgcagcttattatcgtacttgctgctactgataatgaaacccacttaaaagcactgtcacagctttcaatgatgctatctgaaaacgataatattgacaagcttattgctatgaatacaaaacaagaaatgcttgcattaattgaagcttactcaaattaaaaggagagataaaaaatgaaaaagattttagttgtatgcggaaacggtttaggaagcagttttattgtggaaatgaatgtaaagaaaattttagtagagcttggtgttgaagcacaggtatctcatacggatttaacaactagtaaaacggagcaggcagatatctatttaggatctgcagatattgtaaatcaattggatgatggcaatcgcacggtcgtggcactgcaaaacattttaaatcaagcggaaattaaaggagcactgcaaaaatacttcgtggaggcgtaagccatgtttgatttaattatgaaagatatattaggaacacccgctattctagtagggttgtttgcactaatcggtttgttgcttcaaaagaaaaaaagtgcagatattgtatcaggcaccttaaaaacaattatgggttttcttatattaggagcgggagctaatatattaattgcttcacttgaagcgtttggaaaaatgtttaataaagcgttttccgttgaaggcatcattcctaataatgaagcaattgtagctgtagctcaacaaacgtttggtacagaaacagcgatgattatgcttttaggtatgattgtaaatatcattatcgcgcgcatcacgaaatttaagtatatctttttaactgggcatcacaccatgtttatggcttgtttgattgcagcaattttatctaccggcgggttaacgggagcacctttggttttgatcggggcactattattaggtattttaatggttttatttcctgcactgcttcagccgtatgtgcgtgaaattacagggtcaaacgatattgccgttggtcattttggttccttaggctatttagtagcagggtttatcggcaagcgagtaggaaatcgcgaaaaaacaacagaagaaattaaagttcctcaatccttaggatttcttcgggatacatccgtttctgtctcactgaccatgaccgttttatttattattgttgcactttttgcaggccctgcatttatcgaaacaaaattaagcgggggtcaaaactttattgtgtactcgctaattcaagcaatcacttttgcagcaggagtatatgtcgtgctggcgggtgttcgtatgcttttagcagaaattgtaccagcatttaaaggaattgctgacaaagcggtaccaaatgccattccagctctagattgtccaactgtgtttccgtttgctcctaacgcagtggtcattggattcttttcaagctttatcgctggtctcatttcaatgttctttttgcctctatttggtctaagtattatcgtgccgggcctcgttccgcacttttttacgggagcagctgcgggagtatttggaaatgcgacggggggaagaagaggagcagtggtcgggtcatttgccaatggaatcttaattagttttttaccggctattttactgcctgttctcgcgtcgttaggttttaaaggcacaacatttggagattcggactttagtgcggtaggtattcttcttagcatgctaattaaattatttacgtaaagataaaaaactcatgttacgctagtagcatgagttttttatgatattggaagtggaggagcaatgaatgaaaattgggttagcgcaagtgagatttccaaagtcagccgcagagggtgtagaaacgatagaaaattgtatgaaacaagcagcagaagaagggtgtaaccttgtatgttttccagaatcaattgtgccgggacttagaggagtgggttttgaagttgaggcctacaatcacgaaattcaacaaaatacgctttataaagttaagttgcttgccaaacagttaaagctcaacgtaattttaccactggaatggcgcgacgaacttggtatgcatttaactgcttttgtaattgatgaaaatggaaaagaattagggtatcaaactaaaaatcaaattgatccagcagaagatcaatttggttataagcctggaaacagccgccagttgtttgaaataaacggcgtgaaattcggtattgttatttgccatgagggatggcgctatcctgaaactgtccgatgggctgctgtaagaggagcaagcattgtgtttcatccacagtttactggtgaagtaccagatccgaagttttatgattatgcaatgattgcaagaagtacggagaatggtatttactttgcaagcgtgaattatgccttagagaaccaaaaaagcaccacttctcttctttctccaaagggtgaatgtttgataaaagcgaaagctgaaaagcaagaactactaacgtatacgatagagcccgatgaggctaaccggctgttagctcagcgtctgttatcaaatttactattgtaaaaaagtttattttttctagttaaattagcatgtgcgctcttataaccctttggttatttctccttatgacgatataaacgtcaatatggtattatcaaaagttaaagggatattaaaaggtgtgtggaaacaatggatcgaaaaaaagtcgcatcagtagctggagcattggttattgccgtaggaatttggctatttcaaagcgggaaatttaaaagtgaagcgcaggcagataagtttacgagtacatttttggtcgatcatgaacaaacagacaatggatttgaattatttacttcggataccaatcaatataggatgtggtttccgcttcagtatgttattcataaatcttcttataaaagcagtgaagatgaaagtgaagtatggacagcatcaacgaaggaaaatgattcatacaatgctgggaaaataacggctttattttctaagaaaaaaagcaaagcagctcaaaataaaatggatgcgtttcagcctgattacatgttaaaaggtaaaaatgcaacgatttatgtgaaaaaacaaacaagagatggaaagcatagcatttatcatgcttatgtgaatgatgattattcagacaagtatatttactatacgtttgaactaaaaagcagcgaacagacaaacagtacaaaacagcagtattgggtagaaaaaattcttctaaatacacagtttcaaaaaaactcagctgaatagtcagctgagtttttacgtaagggttcataatgcttttccttttttatgtaaacgggtacaatatgagtaaggaggcctttgtatgattgaaaaacaagcagttggtgaaaaagcagcacaatttgttgaagatggaatgattgtaggactagggacaggttcaacagcttattatacaattgtaaaactaggtgaacgagtaaaaaatggattacacatcaaagcggttcctacttctcaaaaaacagaagagctggcaaggaaactaggtattcccattgttaccttagcagatgttgaatatattgatatagcaattgacggagcagatgaagtagatagcgaactttctttaattaaaggaggaggaggcgcgctgcttcgagaaaaaatgattgcgtacgcagcgaagcggtttatcgtgattgcagattctaagaaaatagtgaagacgctaggagcttttcctcttcctgttgaagttatacgttttggctgggaaatgactgcgaagcacattcgcagtgcaggttgtgtaccgcagcttaggcttttagatgatcatacgccgtttatcaccgataacggaaattacattctagactgccatttttcagaaattgaaaatcctgctgagttggaaaagcagctgataaggatcccaggcgtagtagaaagcggtttgtttgtaggaatgacggaggaagttattaccgtacaaaaccaagatgtttatatcataaaaaaatagaagctttggcgtcgggcctaggcttctattttttaattggaaagaacgttccaatttttctctaattgatatatgtattgagacgcgttcagtacatttggatgaacaaaggtatcaattgttttttgcggacaagcagatccgtataatgaaaaaatgacaagcttgctgtgctcgattggtgatacaacgtgagataaacagcgataagaaggatttatcaagctttttaccatctcatagatatcttctttgtcgtaaaaatcgacttcaatttccgtctttactaaataacggctttcaatggcgctgcttcgataataattgtagcgtgctcctatgaagtaggacggatctgatgttgaaacgtccaaattcgtatatgtttgatcctgcttgcttttataaaaaatagaatcatgagtatgcttcatgaattcttgataagttgttccatcttcccacagagctagaatacaagcatctgtttcatcttccacgttccaaccccctaattggccaatgaaaccattcacgtgtgcaagagcagcccaatgctgttgcgtatatgaaaaagatgcttttttatcagtcggtatgctgcatttcacaatttttgtcaacattctcccatcacctcaattaattacttcgataaatgaaggaaaaatccttctaaaaagaggaaaatcatagacatatcccccctttaaaagccatacatttcaaataggacaatgttagggaaagaaggggaaatgaatgaaagtttttcgtgcaaaagcctgtcaatctcctatgcgaaaaggctggtcaattatgtttcagcatccgtttaaaaaagatgaaagaggaagatcgcacccgtttgttaaacggtttatgtatacagagcaacacgatgaaattgacattctcgttgaagagatgaatgaactgctgagagtgcaggatttttggacaagtactgcaaaaggaagagcaaaagcaagatatgatgaacgagtagtgaatgctttttataacgatattgaaaaaagaacgagcgagcaaattgacagcgagtatgagtacattcatgtaatcggagaacaaggaagcggcaaaacagccttaatccgccagcttcttggtataaaaaaggaatgtggctttctaggaataggcagtaaaggcgcttgttctgctacgtataaggtgaaggattcccaacactatgaagctgctgtctctttttttacgcgaagtgaagtgcaaaggaaattggagaatatcctactaagaagcgctgaagtgtatgctgaaggaggcacggattatgacttggtctttgaattattacacggagattcctcttttaatctgcgcgctcttttgggagatatcccatacaaagcccgttattttaatgatgatattcctttaagaatgagtgatgaaaatagttcattcaaacaatttgtagatgcaattaaacgagaaagtgaaatagtaaaagacgctgttgatcacgaaggaaaagattttgcagaaggatggcacaagaggcttgaatgtaggaaaattaccgagcaaatgcttctggcaattgaatcccggttgaaagaatacaaggagggaacatgggaaataggagaagacgactggccaatatcctgccgtctcacagcaaaagagctgtcttcctttggtccgctaacaaatgaagaagaagaaaataacggacgtcttatttatccattgtttcgtagaattgaagtttgcggccctttttcttttaaaaaaggagtagcgatttgcgagcatgcttgttttgaatatacgagcaccatccacgattcttttaaacaagcagcttctattttatacgtacatcatggacttaaacaattaaatattcaatttcttcaacagctcatcgtacatggtcacggtgctaaggtaaacgtttgtgttacacacggagatttgcttacctctccaagctgccgtacggattatgctaaaaaacatgccatggctaaaatgatagattatgcgcttaaaagcgtttcacctcttatgaaaaagcagcttcactactatttaacagtagggaatacgtctattttagaatgtgtacacgaggaatccaaagagagtcatcttctgtataaagacttaaaggcagctttagtatcagaaacgagaaaaaagcagcaagagctgcatcctatttatttaaatttgactgtctctcaggctttttatgaagcgatggagtcgctgaacattccttatatggatagagaaacatgtttgaacatttccttaggagagcatgaagggccggtgccagtcattgcgtccgcttttatttcatctgtctacgagcattttctaagccagccgtctgggtggtcaagtacttatcattcggtcaccgaccgacagcaggttattcaagaattggcaggtgagttcgcaaccgtcatttattcctattttaacgaacagctgcttgaaaattcccgtaatgactgggtcgctctttataaacaaaaagaagacgatcaagcctacaaatatagcagactaatagaaaacgtaattcctgccaaaaatgatatctatcagcagcaaattcttatgagaacggtctatcagttgatcaaatatgttgtagaaaagaaagacggcgtactggttcattaaggagtcaagggaggtcaatataaaaaaggtttatcaataaaaaaacagagcctgatttcaggctctattagcgtttagaaatagcagttaaagtattaggtccggcaatgccgtcagctgctagcttattgtctttttgaaaattacgtacagctgattccgtattagcaccgaaaataccgtccgtgccttttgtatcatagccaagcgccgttaatttcttttgaagggcttgaacattgctgcctttgcttccttttttaagcgtttgttttgtgttaattgttgtatctgctggtggatttgttggctttgttggatttgttggtgtcgtcgggttcgggttcgttcctgaacttcctaaagctttatatgttgatgggccaacaatgccgtcagccgttaagccgtggtctttttggaacttacgaacagctgaatctgtattggcaccgaacacaccatccgtaccttttgtattatagccaagtgaagttagtttctgctgaagttctttaactgcatttcctttgcttcctttctttaaaacagttcctgtagaaggagctggagcagaacctgagtttccagaaacgttgtacccgtttgctgctgcaatgtcgttaaatgatttagaagaagttgtaatcaccactggtgtaccgacggtcactttactaaataaccattctacttcttcatcgtacatacgaacgcatccgctgcttacatatttgccgatggaagcaggattattatttccgtgaatagcatacgtcgtgccgtatgtacctctcgcatttaggcctagccagcgattgccaaggggatttctaggatctccaccaggaatgttccctttgtaataagggcgattgacaattttattcaccactttgaaatggccttctggtgtaagagactgcgtgcgtcctgttgctaccgaaaacgttcggacaagtgaaccattttggtaataagcgagtttattcgtcgctttgttaatcataattaaatgagatggtgttgaagcagcttctgtttttgggactcctacaaataagcaggctagagctaaaatagccgctatgagtacgattgttgttcttgatattctatttgccatgtggtgcgcctccttaggctgcattaatgaaaaacgtatggtgcggcggtgctataaattcttcactaataaaataaaagacgaatagctgcattttctatgcctgtatgtatgcgcttaataaggaaatcattaagtagaaagactttactagcgggaatttataataataagaataactaagtttttcttgatgctttgtacaactttaggaatataagtttactaatctaggggattcatatttacataagcatcacatcctttccagttcttcatttacgtgtaaagaaatgaaagcgttatacagattgttttgtaatcgtattgtaacatatttgtattttttataccataaaaagacataaaatagtataaaaatactttatatgggttttatgtacaaaaaaattaaaagttaaggagaacgaagctattattagatatacgaaactggaaaagaagtatgcgtagttttgtggaaatagataaatattcttattcgaatataaggagggagagagtaaaaaaactacttgcaaagagacaagtagtttttaaatcgttatttttgagcatacattacaacaaaattaaaaaatttataaatgcaatccactgtgctgaacccgcttgctgttaaccaatttaactgatcatgtagggttgccattttatctaacttcgtacgttcatgagcagcctcaatttgctcatgagttaacccgcttgcggcaattcgttcgctccagtcttttttatataactcttcaataatagaagaatggcctaatacttgatcagcattaataaatattcctcctgtatgcagcaaatcataaatttgttcatacagcttgtgttttcgtttgtcttctaaatgatggatagcaagtgaagaaatcacaatgtcaaatgagtgctcaaatttgtagtttgttatatctgatacgataaattctatatgctgttcatttttaaagcgttcctttgctttttcaagcatttgatctgagacgtcaatcaacgtgaaatgcgcatctgggtacttttctttaataaaagaagaaaacaagcctgtacctgctccaatatcaagtatgcgaagaggcttttttgaaaagtgaagaagagaaacgggaatagaataaaaatcaaaaaagcaaggaatgagtttgcggcgctgctcatcatactgagaagcatgagcattaaatttttctttaacgttatttttcatttttacagctcctttatttggtaatatggagatacatatatcgtatagaagtttgatagaaaagaaaataaacaaaaataagcagtattgattccagtttgttatgaatagaaagagatggagagaagaaaatggagatcaaatggctaaaaacattcatcatagcggcttcttatgaaaatttcagacaagcgtctgaagatttatttttaacgcagcctgctgtatcaaagcatattcagcgactgcagcaagaattaggggatgagctttttgaaaaaaaaggtaaatatatcgcgctgactgaggcaggacgcttttttttgcctcatgctcaaaaaatggtgggagcatatgaggaaggagtaggggattttaagttatggaagcaaggatataaccgaaaattgactatatccgctgctcctcaaatagcagcatcgattttgccgagtctaatcaaacaatttgtagagagatatccccatattgaagtcacggttaatatcacaaattcgtttcaggtgggaaaagacatcagcgacagaaaatcagatgttggattaacaaggatgcttccgggtcaggcagacgttttttatgagttaattcataaagaaaaagcagtcttagtggccccgttttctgtaggagcacgtacggaacaggagctgttatcttcctaccggctgcttacgaataatcatcctgtttattgggaagatttactccttcaactcaaggcttgttatcctcacattcagctgcttcctgtgacgcaagtagaaattacaaaacgctttattgaagaaggtttaggcgtatcttatttgccattttctatggtgaaaaaggaagttgaaaatcaaacgttaagcataatttcacagcaaaaaattattcggccttcttcacacacgtatatcgtaacaaaaggcgaaacagaagaaataaagcagtttaagcactttgtagctgagaccttaacagaaacgagctgaaatgataccataaaaaggaaggagagatgacgatgtatatattaatcatgctagttgcagcagcagtcgtagtagattttattttaagaaaagtgcttgatatacctcgcagcaaattttggggcaaatatgagtatgaaagtctagctttagaacgttgggacaaatatgtaatggtagcttttgttctttttctgatattggatatgatttttatggttgtagagacttatatcgtatctttcctattcttagtcgtgaatattttgctgaaaagtatagatgaatggaaatataaacaagaaacaaaagaatacgtaacaagctttgtacagatggggttcttctttacggcttttgttctattagccagcggaaggatatagaaaaagaggtgagacataactacattaatccaatctgaaaacgaacaaattggatatatgaagctgaaacgcttgtgacaccgctgttgatttccgtgcaagacttcgctttcctcgggcggctggtgagcctcctcgtcgctgacgctcctgtggggtctcaccccttccgcttttcccgcaggagtcttcgtcttgccctccaatcaacagctagaagcagttaaacgtatgaaacctacgttcaccataataataaaaaaaccgaacaatcaatcgtttcgattgattgttcggatttcccttcagctattttgtccgagcctcttttgatattatttaaaaatatgatcaatgtctttaatttcggaagaagtgagctgaacatctagtgtttttaagttatcaagtacttgttcagagcgttttgcccctggaattaatacatcaattgaatcgcgcgttaagtaccaagccagaacaagatgagctacttctacgccttttgcgctagagatttgacgaagacgctctactttttctagattttgctgaaatgcttccccgataaaatgaggcatatcttcgcgcaggtcattaaactttgtgtttttatcgtatttcccagcaagtaaaccagcagctagcgggaagtatggaataaatgaaatgcggtttgcagccgtataaggtaaaatatcgttttctgcttctcgctgaattaagttatattggccttgtaccacgtctacataaccatctttatttgcttcttttaactgatctaacgagaagtttgatacgccaatggaacggatcttaccttcatcttttagttcttttaacgcaccaaccgcttcgtcttttggtgtgtttttgtctgggaaatgaatataatacaaatcgatataatctgtttgaaggcgttttaagctatcttcaactgactgttttaaaaacgcaggagagttgtctagcagtacctcatctccaacaattttatgtgctccttttgtggcgataaccgcttcttcacgatttccacgttcttttagcacttcaccaattagttcttcagaacgttttggaccataaatgaacgctgtatcaaggaggtttatgccattatctagcgccttatgaacaaggtctttgccgacttcttcgtttaggttaggatataagttatgtcctcctacagcgtttgttccaagtccaataggattaacatataattcggattttccaatctgtactttttctgccatgtctaacgtccatctccttttttatatcttcttttttactatagcaaaatataccatgaatcaaaaatagtacgctcatatgaaaagcagctttaaaaaagtatgtgaacttgagttacatgtaaataaggagtatattctacagggctctatttcaatagcagaaataaaaaaagaacctcttttaaataagagattctcttttagtcatggtaatatgataactttttgacagctgaaatgtttcagcaagctgcctgcgtccttgcgctccttgttcgcgtacatactctaattcgtttggtgtaagaagcttcatgctaatcagtttaatagattcgtaaggtaaagagaggctagctgaaacagaaggagactgaacgcctagcaatacaccaatttctccattttcatttacaaaatgagacggtacgtccaaatcagtaaattcaattgaaagaatatcgtgcttcatgaatagttctagcatattaggatgagcggcagcattttgactcatttgataaagaaggtcaaatgcccagtgatcctggatatcagataaaggtccgcgcagagattcatcatcgcattcgatatagaattctaatccttttccttgctttcggctcttttcttcgggtgattgaaacggatcggacaagccgtcgcttgcgagaataaccgtctctgttttttgaacgcgaataaatgtttgacgtccagatggccaagcaggcccgccaaaaaacatgggatttaacaaatgagttaatacgtctccgtctacatgtccaattgtgttccagtagtcttttctttttgagattgattcctcaaaaacacgctctgcttctttttcctgcttcttttgcttccactttaagaataatgacaagtatcccacacctctttacgacttcatagtacccaatatatacctcattaagggaactcgtaaaccattatttagtgcatgaaagtaaatttttcctttaaattataaaatacccaaacttttcttaggaaatcatagaattttgtctttaataaatcagttgaaaaattaaataagccacgtacacggcctgtgcgaaaaataaaaaaccccaaaagcgtgctgaaagatgggtaagctgctttaaactcgtagcgtcacctgcatcgtgtggatatttgatgcttaacacaaaaataataaaggcagaaaatagagattctacaagtaagagtgcaccaacaaacatcatgctgtagcgtgtaagctgtgggtcttgtaaataataaatacctccgaggatcaaaccgatagaaaaaagccacacaattccgtatccgttacgtacccaaagcagtaaattaataacaacaacacttcctaacccgtaaaaaagccagtcgtagtgatggtgaacgagcaggtagaaaaacagataagccattgctgagctgaacgggtagccggctaaagcaataataacgcgcggcagccatccacgggatcctgcgtaggtggcagtcacagctacgccttcattattggtataaagctcaatgcgattgacgccttttccgacaataagccccattaacgcgtggccatcttcatgaaacatcgtatttaaatttgaaaaataacgtccaatatgccgaagcagctgattaatgctaggagcaaatgaacctataaagggaatgcctcttgttagcacaaaagctaataaaataaataagaaaagcgtagtagattgttccatcgcgatagtccttttcgtaaaatgatatgtttctactttactcgcaaacgtgctaaaagggaaatgaaacggctagtttctctaggaaaagagaaactggaagatttacataatattagtgttaacagacctgacacattcattgaccagcttattccaaattttatattctaaacagatataagaaatgaggagatggttgaatgaaagatacgtggaacgcatttgtagacagtgacctttacgtacctccaacgggaacgggaatgttaaataacttgagttttgcgttaaaagacgtatttgatgtacaaggacatatatcaagtgcgggaaatccagattggctcgccacgcatcagcctgcaagcgaacatgcagacgtagtagctgctcttttaaaagaaggagctgcactaaagggagttacgcataccgatgagcttatgtacggattaaatggagaaaacgcgcattacggaacacccgtaaacccaaaaagcgcagatcgaattccgggaggttcttcaagcggatcagcggttgctgtcgcagcgggactaactgattttgcgattggaacagatacgggaggatcggttcgaattccttcaagctactgcggtatttttgggtatcgtccttctcacggacgcatttctacaaacggtctgattccacttgctccaagctttgatacagttggtgtaatggctagagacggccacactctgcaaaaagtaggagcggttttattaaattcaacgtcgcgtgctagtggatttacacggctgtatgtaccaacagatgtgatggaacttgtggatgaacaaagcatgcgagctcttgcgccgtctatcagccacgtaatggagtctttctctactatagaagagatagcgattgctcctcagggtttttctgcatatatggaaaccttccgtttgctgcaaggaaaagaaatctggcaaacgcacggagagtggattcaaaaagaaaacccaacgtttggagaagacattggaagccgctttcaatgggccagcactcttacattattaaatatgaattatatagaagaaaagcgtcgtgaacttcgctattttatgtactcacagcttggggaagaaggaatattagtccttcctacagctccaggacccgcgcctgtaaaagatgcaagaggaccggagttagaaaacagaagattgcgaacacttcaaatgacgtgtattgccggcctgagcggtcttccccaagttacgatacctgcaggagaactagacggtttgccagtcggtttatcttttattgcaggatacaaccaagatgaaaaattattaaattgggtgaaagaaaacagcggtcgtatcattcaagcatcggtaaggagcgtatcatgaagttagtaaatataatagagcaagggaaagaacaagcagccattttagacaatgacagcattctgcttatagaagatatcaatactaaatatttaacaaactggtctacaacaatttgggatcttattcaatataaagaacttcgccaccttgaaacatggtacgcccataataaatttggtatgaacagctcttttcccgtactgcacttgcagggcagaaaaacagctcctatcattagtaacccgtcgaaattgttaggcattgggtttaattatgcggcttctgaagaaaaattaaaagactacaaccgtgccattgatccagttagttttttaaaacccgcaaccgccattattggaccagatgacagcattcgtattccaaagcagtcctacaaaacaacggctgaagcggaactagcggtggtaatcggtgaaacgtgtaaggatatagagccagatgaagccataaatgtaattgctggttatacgtcagcaattgacgtaaccgcagctgatattcatgcggcgaatcatcgctacttaatgcgagcgaaaagctttgatacattttgcagtataggctcagaatttattacaaaagaaagtatatcaaatgtgaaatcacttcaagtgcgcacattgctaaacggagacatgcagcatgaaaatacagtgtctaatatgatttacgacatcgcatactgtgtttcatttttctcaaaagtcatgacgctgcatccaggtgatatcattctaacaggaacgccgggacccgctgttattgaagacggggactgtattgaatgccatattgaaggcatgcttccattaaaaaataaagtgaaagatatgaagaaagtgcctcagcaaatctaagaagaaaacccgttgcctacacgcacgggtttttgagcagaaacgaatatcttcacactcagttcacaattagtagatatactaattaaaagagacagctgcggtatcatatactgaaaaatgaaatatttacaaatggaaaagaaacgggtacgatatctgtagcgacacttaataaaaaggagctgactgacagtatgattttagtcatcggaggagcaggctatatcggaagccacctagtaaaagaattagtgaaaacaaatgaagttgtggtgcttgataatctatcaacgggtcatcgctgggcaatcgatgagaaagcggtattcgtagaaggaaatctaggtaatgagaaagatttagaaagcgtattcacaaatcataaaattgatgctgtcatgcattttgctgctaatagtttagtaggggagtcagtaacagatcctcttaaatattatcaaaacaacgtagctgcgacgttaacccttttacaaacgatgatgaagcaccatgtgaaaaagtttattttttcatctactgctgctacatatgggattccttctgtagatattattacagaagatacggcaacaaacccaataaatccgtacggacgttcaaagttaatgattgaacagattttagctgactttgcaagtgcctacgatatggaatatgtggtgcttcgttacttcaacgcagcgggtgcttacgaaacagcagaaattggcgagtgccatgatcctgaaacgcacttgattccgatcattcttcagcaccttcttggtgaacgtgaaaacatctctgtattcggctcagactacgatactgcagacggaacgtgcatccgtgactacattcacgtaacggacctagcgaatgctcatatttcagcgcttcaggcattgttagacggctcgaagaaaacagcaacgtacaatcttggaaacggacttggctactctgtaaaagaagtgatcgaaacgtgtgaaaaagtaaccggtaaaaaagcgaatgttgtaatggcagaccgtcgcgctggagatccggcacgcctagttgcatcttctgataaaattcatgcagaattaggctggaaagcgcaaatttcattagaaaaaatcatcgcatcagcttggaactggcatcaaaacagcgcaaaagtaacaaattaataaaaaagcctcttttctttttgaaagaggcttttttattacgattaaactgatttatgttctaaataatcatttttaaaatccagtgttttagcccacagataagccttcttcttttcggacattttccctaaacaagcacgacttttgttcttttccatatgatgtaggtaaatataccattcccaactatccccgtttataaaatagtccgcaaggaggttatgatatgtattactgtgtaagatgctccaaatttcatgacgaacaggaaaaagaaaacatctttcaaaatggtttttacattgatccctatttgcttcaaaaagtccatctaggcatgtgcgtccacaaatccccatcaatcaaacaaatgagagccgtagaacgattcgaaacgaaaaaaatgtagaattcacattcaccaataagaagctagatctaaccaggtctagttttttcagtgaataacagctttcttcagctatctttcatgtaatattaagataaatttaagacaagcccgctatactagttagtagacgtatacatagggtatggtacgttaagaaattgaaacagcagtccgttttataaactagaaaggatggcgtcaaatgatttctgaaaaacgatctcttttgttgaaagaacaagcaaagcttctcgcattaaaagaatataaaggcattgtcaaatccatatcgctgagtaaaatactcactcttcctatttatatagtagatatccttacgttaaacggagaagagcacaaagtaaaaattaacgccgaaaccggcagtattttgaaagaaaaaacgattcctttaactaaaagccgtgcaaaagcatatgcgttaagacagcataaaggtattatcgaatcgattgttctcactaacaagcagtacgaaattgtgattcttggacctgatggaaaaacccacagcgtaaagattgatgctgaaattgatgtgctggcacaagaagagcgaaacattcagtaaatggcttatattatgtaatcaacctcacttttttgaaagtggggttttctttattgagagaaatcattaataaaggtaacaatgataaaaaaagaagtgattatttctttaatagaaagggtaagtgatagtaaaaaataaccacttcctaattatggttctttgattcgttctgcttatgactctcccattataagtatgatagtatcgaacatgtataaaacataggttataacataactaaaagggtgtgcgacaatgaaaaaacgtacgaagaccattattgcagtcattgcaggagctgctattttaataggaggaatatggatgataaacgaaagccgatacccaaacgtccccgcttttgatgatcactttacacgtaaattcttaaacaaagataaaaaagtggatgacgggttttatgagtttaagtcgaataccgggcagtatacgatgtggtttccggaggagtatcaactaatacatgaggatgcatcagattatgttaaagacgatacatactatgaattttggaaagcctcgaataataacaatgaaggacataaaggatatattaacattgagttgtctgagaaaaatcccgataaagaaaaggtctatgtagaaagcttatttaagaaacgttttcatagtactagccctcaaaagttacagacagatacaacaaaaatttattatgacagagcgtacatatattttaaaggaacagataaaagggtgattacggactttaatagacatattccaactacatatgctggttatattgcagacaagaactccgagcgtgtaattgaattttattttgatagtacaaatgatcatctttctaaaaagtcagcagaagaacgagataaatggattataaagatattaaagagcattacttttaataaggatgaacacaatggctaatcattctgttttagataatagtttaagaaataagttaactcaacttgaatataaggatctatcaggaaaagagaaagaaataaaagaaatctataaagaaactatggggaaagaaccgccgaattttgagatttatagcagtacggacatgaaaattggaaaaaagtctggtttcgatggagctgctattcatttttatgacaaaaagcaccatattaatgaaatatattatatctttagaggaacagaaccatctaaagattttggtgatgtggtttatgatgcattaggtattggagcaggaaaaagtaacaagcaaatcaatgatgctttagagatgtacaatgaggtagaaaaaaaggtggaaggatcagatattgaaattaaaaggtatggagatggtcattctctaggtggtcaccttatagttacattaggtctgttaactaaaaactttgtgaacataagagggttgaatgatgctcctgtaaatgttaaacaactcaaagaccttgataaagacttcttagaatatataaatcgaaaaagaggagcaagcagacatttatcttcaaatgacctcatatctctagctaatacttattatgaaaaagaagtaaaaagaatcagccatacctgggtaaaaggcgagcctatgcatgctcaatcctttccaaacagctggtatgcaggtaacaaagtaaccatgcttggagatttagataaagaagaaatgattaacattggaaaatatccttttcagaaagaagcaaaatggaacccagtatatatgatagaccaattccgatataaccttggagtaaagacaacattaggcggtttagggtttgttaatgatcatgtgaaacaagaaacgttgcttagcctgccagaaacacgtgatcaatatcttgagagtgtaaaaagatatccttttcttcattttggagagattaaagcaggtataggagtaggtgcagcagtaatggtaaatacatttactagccctggagcaacatttcagcttattaaaggaatatctcaaagtaaacaagcaaaactccacggaattaattatgttgtcaaatacacagaagctaatgctatgaagacatattatcaggtttttgattcaggatctcaggaagaaatcttgctagattatgaacaaatgaagaagtttgtttattactgtgctaatgccattaaagacaaagaagcaaacttaaatgcgctaaagcagtatttacatagtgaaattaatgaagtcttcgaagcagagaagaaaaagttaaaaatgaagatatccagtgaagaagcttctccccagtcatttatggaaaaggcagataaagacggagctaccctcgcttggtttggacaaaagcgtgtggctgaaaaagtgacgtttgacaaaacgtttgatccgctagacgatagtgtatttactcctgttgaaaagatcatttcttctattcaagaggaagttacatactatcaaaagtttcttgaagcgttctttcaaaatttcgagaagatgatggaagcagacgaatcggtagcttcagatattaaaagcatgaaagaagtagtaggggggatttaattgtttgattttacacacacaggaacaacgagcggtaaatatacgtttgaatttgatggtgatgatttcaaaggcgagcaggcaaaaaggattaaagagttaatcaagaaggatcaagaagtgaatgaaaagctttggcatgctaaaagctatttagaaaaccaaacgggtaagttttcggatgcggttaaaagtaaattagaagcagctgagcggggatatacgctacgagctcagcagtatgatactggatcatttcagcatattatgagttttatgcattctgttacagatatgcataagagagagtacgaaattcgatataaagaatcaatggatgaaagggaattaacataaggcatactgctattcctcagacagtggtctgagggatttttatatgttgaacactttacattaagtcccgtttatttcaaaagaataataaagggagtgtatggcaatgaaaaaaagtacgaagacccttcccgcaatcattacaggagttgctattttaataggtggaatatggatgataaacgaaagccgctatccaaatgtcccagcttttgatgatcactttacacgtaagttcttgaacaaagataaaaaagcagctgatggtttttatgagtttaagtcaaagacaggacagtatacgatgtggtttccagaggagtatcaagttttacataaataccgcgaggattacactagaaatggcgaatcatatgaaaattggtcagctgcttatattaaaccctacgaaaatgatcaacaaacgtacgctatcaatgttaaattttcggagaacgacacaaaatcagaattaatttatgtagagagtttatttaaagaacaattaggcagtaaaaaacctaaacagttagaaacctctaatacaagaatttattataattctgcctatacatattttcgtggtactaaccaacatatagtacatgacagtaaagaaaatccacccaacctttatgtcgcatatgtagcagataaaagctctgataaggtaatcaaattaatatacgatagtgtaggagaaaatacagaaacaaatcaaatggatagaaagaaatggtttttgaaaatgctaaaaaatattcattttaacgaggggaaatagtaggggatttatagagaagaagagatagcgagttaaatgaagaaagttataagatttgctttagctgttagtatattagctgtaggtataatgtttttttgtaatgctttataggggctattatcgttaattttccaacgagcgtctatttattagtacgagcaatttgtctatgattacaagccaacgataacaggttattgtgctaagtatatgataaacgtaaatttcacatattaggtgtttctagcggttgattcgagggcaaggcgaagactcctgcgggaaaagcggaacaggtgagaccccgccgcaggagcgtaagcgacgaggaggctcagcggcagcccgcggaaagcgaagccttgcacggaaatcaaccacggtgtcacaagcaatctatactagtccctttatttaatttgctcatctttagatgggtcgagttacttatgtctcaatctcttttttgaaacatcttttacagcctatctatcaaaagcataaaagtctctaaaacacttctttgttgctatcataagcctccagcaagtctcaaaatacctaaatcgcctaatggaatatcttacttttaatggacaattagctgtttttaggatatatttttataagtttaggttatggaagaaatagtatattgaaaacgaaaggtgattaaacgaaagaatggatgctcatgttttaaaggaactgacgtatgaagactttcagtttgtatatcagcctatttatgcgttgaattcgtgggagacgctgggttttgaggctttgctgcgcacagctttcgcaaaagggcaaattgaagagttgttttcactggcaagatgccataattatttgtacaagcttgatacgatggcaattgaaggggctataaagaactttccgtttgaggtattgaaatctgaggatttatttatcaatgtgttttcctctactcttctccacccgcattttcagctgtttttaacgtatctgttgaatacctataaaaacgcgaagcatcgcattgtatgggagttaaatgaaacgcttcatgaaaagattttatgggaatcgcctgctctttttacccgagtaatgagtttgaaagaggccggtttcaaaattgcgattgatgattttggagcaggggctgcagcgatgagacaagtgagcatgtacgaacctcactatatgaaattggaccgaagctatgctgaagggctagccgactgcaagcaaaagaaagatctgattgatttgcttgttaactattatccgcatacgaatctcattttagaaggcgttgaacgagataaagatttagccgcagcgatttcgttaaacctacatgctgctcagggctatttgctgggcacgccgcagtcgatctcttcctacttaacttataataagtaccgcagtttattcagacgagaaaggcttctgcactcctaaaacatatccttcactaaatagatgatgtatcctaatatataaataggtaattagacgtaaagatgatataggtatctaaaattattaaaaaattatgaggttttatggggtgaagcagacgtgtttttttggaataatgagtgaattacatatagaaataaaaggttcaatgaaagttcgaaggcagatggaggatatttagtatgtatagtgaagggatattccaattttattttatgaatatgccgcagcctgttattttaattcagcaagaaaaacatcatctatattataaaaaatgtaacaaagcagctcagcaattctttgaaaaaatggaagacaagataatcaataaagaagaaaatctgcttttttacacactttgtgaaaaagctattgccacgaaagaaccaattcaatatcaatacatacagctttttcagcccgaccggcatgcatatgaagtaacatttacccctctttttaatcaagcgacggccccttcacatgtccttgtcatggctcaagaaattcattataaaaaaacgcaggaagagagcacgcgtttactcaatgcgtttctagaaaacacggtagatgccattctaattgctgattgtaatgagaaggtcttaacagtcaatggagcatttgaaaagctatttcagtggagaaaagaagaagttataggaaaaagccgtcaagagatggacatcgtatcaaaagaagagggaaaagaaaaccttaaattaatcgaagaattaaaaaatggtaagacgctgcttccttatgaaacagtcaggtacaccaaaagcggcgaaagcgtgtgtgtatctgtcagctgttcaccgatttatgatgatcaaaatcaactggtcgcctattcggtgatttaccgagatattacaccgattaaaaagttagaactggagcttattgaaagtaaacagtggtacaagtcgctgtttacaaatcaccaccacgcagtttgtatgctggatatggacggtacgattttaaatattaacagcgcattcttagaaacgcttcatctttctgcaagcgatgtgctgcaccaaaattaccgagatattgctaaaaggctgggagtctgtaattacaagtcttggaatgtatatgaagcaatcagctacagcacagagctaacacttcgtagaagtcaacattccgcacagcacgtgtacattacaaccattcctgtcaaagtaaataatcaaacggttggtgcttacgcaattttacacgatattacgcctcaaaaagaagcagaagaacagctggcttatacaatgaaagaacttgaaaatataaaatatgcgcttgatgaatcagctagcgttatgattctagatgcaaatggaactatcacgtatataaacgatatgtatatacgttattcagattatcaaaaagaagatttattggggaagtattatcgagatgcagggcttcgtcatgacctttctgagctgcgtgagacaataaaaagcggaaaagtatggcgaggcgagcttgaaatgtggacgaagcataatcagttatactgggtatcgaacacaattgtgccattaaaagatatagagggaaatattacttattatgtctcgattcataatgatattacagaacaaaaagcgctagaaaataaacttcattttgaagccactcacgatagtttaacaggtcttcccaaccgggcgatgttattaaaagagttaaacaaagtaattgaaaaagggaagcaaaaaagcgatgagttttttgcgcttttgtttctcgactgtgataattttaagcagattaacgatgaatatggccatcatataggcgacgaatttctaaaagcatacacgaagaggttaaaaagctgtgtgaggaaaggcgatcgcatttatcgtttgggcggagatgagtttatcattattttaaacgtaacaaatggacgagaaattgaacaaattgctaggcgaattcacgtatctcttcagcaaagctggaatgtacgaggctattgtttgtgcacaacaactaccatcggtgtctctatttatccagaagacggggaatcggctgcttcattattaaaaaatgcagatgatgcgttatataaaggaaaaagagaagggaaaaataattatatcctctaccaaacgtaaaaaaagcctccaaagaggcttttttattttatccatgtttttgcccacttgctgacggggcctaagatcgtaccaagctctgatccttttttagttaagatatattcaatacgaaccggacgttcaggaataacgtgccggattacaatgccttcttcttctaactctttcattcgttcggttaacattcgtttacttaaagagggaatgctgctgtgaatttcactaaagcgtttaggaccgctcatcaggacataaataattaacccgttccatctttttcctattatatcaaacgttttccacacttttggacataactcatcaaattcattcattcatgccacctactttatcgtatataggatattaaaagtaactcttgtaatgttattatatactagcatttggataatgaaaaggctatctttttttattttcaaaactttcagtagcttggaaacgctgtattgtaaagtttttaaaaaaagtcacaaaatcgacatattattattgacgtatcaagaaaaaaggtctaagattggttacataaagttacctagttaagtaaaaggtactttaaatttacaattacatcaagagtttgagaaagaaggttagtatcaaatggatatccttttggctattcttcctgcgattttctggggaagtattgtcctgtttaacgttaaattgggcggaggtccttacagtcaaacgcttgggactacaattggtgcgctgatcttttcagccgttatttatttcgtagttcatccagtgttgacgccgcttatttttattgtcggaatcgtttcgggattattttgggcagttgggcaaagtaatcagttgaaaacgattgattatattggtgtttcaaaaaccatgccaatttcaactggtatgcagcttgtgacgacatcgctgttcggtgttatcgtgtttcacgagtggtcaacaacaacaaccgttattttaggcgtgttagctcttattttcattgttattggtatcgtgctaacatcactagaaagcgaaaaaaacccagagcaatctggacaattcaaaaaagggatcattacccttattatttcaacaattggatacttagtgtatgtagttgtcgctcgtttatttaatgtagacggctggtcggcactattcccacaagcaattggtatgttaattggtggacttatacttacttataaacacaaaccgtttaataaatacgcaattcgcaacattattccaggcctcatttgggcagctggtaatatgttcttatttatttctcaacctaaagtaggggttgcaacaagcttctcattatcacaaatgggaatcgttatttcaacgcttggcggtatcttcttacttggagaaaagaaaacaaagcgtcagcttatttcaattacgattggtattgtgctcatcattttaggtggcgtattcctcggaatggctaaaagttaacgtttacgtaaaagttaatgatagtatgtatgaataaatgaaaacactaggaggattttatgatgtatacagatttaaaagataaagtagttgtaattacaggtggatcaacaggtttaggacgcgcaatggctgttcgtttcggtcaagaagaagcaaaagttgttattaactattacaacaatgaagaagaagctttagatgcgaaaaaagaagtagaagaagcaggcggacaagcaatcatcgttcaaggcgacgtaacaaaagaagaagatgttgtaaaccttgttcaaacagctattaaagaattcggtacattagacgttatgattaataacgctggtgttgaaaacccagttccttctcatgagttatctttagacaactggaataaagttattgatacaaacttaacaggtgcattcttaggaagccgtgaagcaatcaaatattttgttgaaaacgacattaaaggaaacgttattaacatgtctagtgttcatgaaatgattccttggccattatttgttcattacgcagcaagtaaaggcggtatgaaactaatgacggaaacattggctcttgaatatgcgccaaaaggtatccgcgtaaataacattggaccaggtgcgatgaacacaccaattaacgcagagaaatttgcagatcctgtacaacgtgcagacgtagaaagcatgattccaatgggttacatcggtaaaccagaagaagtagcagcagttgcagcattcttagcatcatcacaagcaagctatgtaacaggtattacattatttgctgatggtggtatgacgaaatacccttctttccaagcaggaagaggctaatagtttttaatcgatgtggaaaaaagagacatggcaaaagcgccatgtctcttttttctatacctaagcgaatgccgccccccttgcggggttggtggcattcgcctaggtaaaagttttttgtgcttcccttataggtttattgtattacccagccatttttttatcagacgaaggctggtttttgtcttttagtttgctaaagataaaggcaagaactgagcctgagatgttgtgccagacgctgaagatggcacttgggacagcggctagcggcgaaaagtgagtggaagcaatggtgacgccgagccctgagttttgcatgccaacttccattgccactgctttttgtttggctagatccattccgcataagcgggcaaagaagaagccgattgtgaaaccaagaatgttgtgaagaacaactacggcaaaaatgataccgcctgttttagcaagctgtgcttggcttcctgccacaacggcagatacaatcaagacaatcgcgactactgaaacaaggggaagagctttggaacttgcttctgcagcttttccaaaaaactttttgattgtaaatccaagagcaaggggaatgatgacaacttgtataatggaaataataagagacatgatatcaatatcgacccacttgcttgcaaataataaaataagaagcggtgtaacaatcggtgctaaaatggttgaaacagaagcgatagcaactgcgagcgcaacgtttcctcgagccaaaaagaccattacgtttgatgatgtgccgcttggacagcagcctactaaaataacgcccactgctatttcttttggtaaatctaagccaatcgccaaaccaaatgcgagaagcggcataatgataaaatgtcccaccacgcctagtgctacttctttcggtcttcgaaatacttcgctgaaatcagatgctgacagcgttaatcccattccaaacatgacaattcctaagagcggaacgatgtactttccaatccatacaaaatgctctgggaatgagtaggcaataacggaaattaaaataacccaaagcgtaaatgtttttcctgcaaatgtactgattttctctattgttttcatctgtacgatacctcctgcgaactataagaagaaattatactatttattcagaaaaattaaaacagtatttttgtaaaatagtacagaatattttatcttttggagattatttcagcttaaacgcaagcattccttcattgaatacacggaatatgtgataatataaagaagttagttttagaaagtcggaggagtttagtcatgaaatttatctatattttgtctgtccttccgttcgtaggcatattaggttttctcccttttgttaaccgagtcactccgtttgttctcggtatgccgttcaatatgttttggatggtgatatgggtggtgcttacgtccattattttaggggttatgtacaagcttgatcccagaaatcgggaaggggaagaagaatgaatagtgcacttattattattttactatttttagtggcagctatttttcttggcatacgatcaaccaaaggcaaggatatgaacttggagcagtggacggtaggcggacgcggtttcggggctgttttagtgtttgtgctgatggccggagaaatctatacaacattttcgtttctaggcggaagcggatgggcttatggaaaaggagctcctgcactttatgtgttaatttatattagcttatcatatgtcttatcatactggcttcttcctgttatttggaagtatgcaagagatcataagctcgtctcgcagcctgatttttttgtaagcaaatataaaagcccttaccttggtgtgcttgtagctgctgtaggagtgattgctgtcattcctgttatcgttgtgcagttaaaaggattggggattattgtatcacaagcatcctacggtgccatttcaatgccggcagccatttggatgggagctatcagtttaacgctgtatgttatgatatccggtatccacggttctgcatggacggccgttattaaagacattatgatgcttgctgtaattgggtttttaggcatttatttaccttttcattattacggaggatacgggccaatgtttgaagcggtgaatacagcgaagccgggatttttaaagtttcctgagcaaggattaagcgtctcgtggtttatttcgaccgttattttactagtacttgggttttatatgtggccgcaggtgtttagttcaagctatacagcgaaaaatgcaaaggtatttcgtaaaaatgcaatcattagtcctctttatacgctgatgctgctctttgtattttttgttggatttgcagctattttaaaagttcctggtttaagcggaggagacgtggatcttgccctattacggatctcaatccaaacctttgatccttggtttattggaattataggaggagcgggtttgctgacagcgcttgtgccgggatcgatgctgttaatgagtgcatcaacgctgctggctaaaaacatatacaaaccgtttgctcctcaagcaagcgaagggcgtattgcccgtttagcgaaaagctttgtacccgttgtggctctcatttccgtttactttacgctaaacggaggaacgacgctgtcaacaattattttaatgggctatagcctaatgacacagctgtttccatctctgcttttcagtttgaagaaaaataactttgtaacgaaacaaggagcagcgtgggggattgttgctggaattattgtagtagcctatattacaatcagcggatctactattgggacgttatttccgtcactgcctcagcaaatgaaggatatcaatgtcggatttattgcgctgcttgtcaactttatcgtaatgtgggcagtcagtatgctcacaaagcaaaacgaagctgggacaaaagtatgttagacgaagtgaaaaacgaaccattaatcaacacgtttgattgggggttcgttttttttgttaggtcaacgttagacccttctagcagttgattggagggcaagacgaagactcctgcgggaaaagcggaacaggtgagaccccacaggagctcaagcgacgaggaggctcagcggccgcccgcggaaagcgaagtcttgcacggaaatcaactgcggtgtcacaagcagttcagctcatgtctcccgtttgttcgtctttcgattggattcatctcattatgtttcagtctcattttttctaatcaaacagcaaagagccaaaggaatagaatcatcctttggccctttacgtggcttttaaccgataatttgtaaaatttcctacatcaactgatttacgctaaagcgggaactcggtcgttatagtaaataacttccgataggatcttacaccctttaatctcctgaaatgtctttttcgcctctacctctgattcaaattcaaacatagtcggactttggtttttcgagtaaacggtaatgatccacattgtaaaataagctccccctataaataatagttttcctttttagtgtagctatcaggtgatgtaataataattgaatagttgtgatacagcctcacattttaaaaggtacttctactatacaacaaaaattacaaaataaaacaagaaaatctaaaaaactacagagaataatgaaagagaataaataactgtttatatatgggctatatttataaatggaagtaggaatgtaaaaaatatggggaagagcgattgtcttttagattgctaaactatatacttatgttcaaaaagtgcaggaagtgaacgatgaaagttgatacggtagtaaaaaaagatgttttacttattctggtgatgatagtcgttgtgccgctagcaggagagcttaaatattatccttttcatgatacgtatagagttagctttgctgtgcccatttttttcttttcactgctgcttttaagaaaggtatctcctgttataccaggtattttagttgcgagtgctatagtgggctttcggatgtggcttgactggtatagctacgaatcatttgattttctgcattctttgcagattaggtgttcagcggggatttattatcttgtttatgccattgctttttcttggtttaaaattaacgattttcattcaaagccgtggattattggcatatggagcatcatcatcgaaacggtttcaggcgggatggaattgttttttatgtatgtaatggttcatcatcatattgtgtttccggagttcatgcagatttttattgtaggcgtctttcgaagtttctttgttttatgcctatttagcatgatcaaactttacgaggggcagctgagagaacgacaaatctctcaaaaaaatgatcagctgcttgttgtgctttcaaatttatatgaggaatccattcatttgaaaaaaacgctgcaggacgctgagagaattacgaaaaagtcgtatgatttgtatgaagaattacacgaagcggatacccaccagcttacttcactgcacgattttagccaaaaagcattacaaattgcaggagaagtacatgatattaaaaaagacaaccagcggatatcagcagggctgtccaaggtcattacaaaagaagaattttctgagtatatggaaatcgaaagtctgcttcaaatcgtgatgcgcagcaacgaaaaatatgcggcgatgttagcaaaagatattcatttttcatattcgattttaggagagcatcctcgctatcatgtgtacttgtttttatcattaattaataacctagtaacgaatgcggtcgaagcgattgaaaaagaaggcgcgattattatcgacgtatgtcgagaagaagaccgcattttattgtatgtaagagacagcggtcccggagtgaaaaaaaggcatgaacgtcttatttttaaagcgggatttacatccaaatatgcaaaggacggaacgccttctacgggtcttgggcttgtctacgttaagcaaatgaccgagcagctgggagggaatattcaatttgttaatctgtctccaagccccggtgttcaatttgctatagatttacctatttctacgttaatgggggataaggactaatatgcgattttatatcatagatgatgacgaagtctttcgttcaatgttagccgaaattattgaagataatgatctaggggaggttataggagaaggagaagacgggatcgtgttaaatgatcaagtttctttattgcagcagatcgatattttatttattgatttattaatgccgattcaagacggaatcgaaaccgtgcgcaaaataaaggatagttttaaagggaaaattattatgatgtcacaggtagaaacgaaagatttgattggaaaagcctactcgcttggcattgaatactatatcacgaagccgcttaatcgtatggaagtgctcatggtcattcaaaaagtaattgaacgaattcatgttcaacaatcaatggagaaaattcaagaatcgttaaataccgtacttaatgtaggaaatcagcaaaaaacgccttcttttggtaaaaaagaaagcgatccggcagaggcgtgcaggtttcttttaagagaacttgggattttaggggaaagcggaagtaaagatttgattgaaatcatcaattacttgcatcaaacggaaaaaagcacgatgtatgaacagcattttccttctctcaaagaaatttttgagaaaattaccgtgagaaagcttggttcatctttttcagaagacgtgctgcaaaaagaaatgaaagcagctgagcagcgagtaagaagagctatttatcagtctttaaatcatttgacctctcttggcatggttgacttctttaatcctaaatttgaaaattatgcttctaagtttttcgatttttcaatggtgcatcagcgcatgagagatatagaaaaaggcacgggaaaaagcagcactccgagtcgtataaacgtaaaaaaatttatccaaatgctctattatgaagttaaacaaacgctgtagtaaaaaaatacagcgttttcattttgtaattttctaaaaacttttttgttagtttcagtaggtttttgttagattttgtgatgcctatgataatgtaatcttatgaataaaagaactacttaataaacagttcttaatggaattgtatctgttgaatacattaagtgcaaataaacagctttgagctgttagaaaaaagaaggaaggtgcaaagatatgttcaaaaagcttggattagcaggacaaattttaattggtttgattgcaggtattattgtaggggctattttttacggaaatcctaaagcagttgaagtgctgcagccaattggagacgtattcattcatttaattaaaatgatcgtggtgccgattgttatatctagtatcattgtgggcgttgcgggtgttggtgatattaagaagcttggtaaattaggcggaaaaacaattctttactttgaaatcattacaacggttgctattgttgtaggcttattagcagctaacttgcttcaccctggtactggtgtggaccgcagcggtcttgaaaaatcagatatcagcagctacacatcaacggcagaagctacagagcaaaaaggatttgtagaaacatttgttcacatcgttccaacgaatgtatttgagtcaattgctgcaggcgacatgctgccaattattttcttctcggtcctatttggacttggaattgcatcaatcggtgaaaaaggcaagccggttttaagattttttgaaggcacggcagaagcgatgttttgggtaacgaatttagttatgaagtttgcaccgtttggcgtatttgcattaatcggtgtaacggtatcaaaatttggactagcgtctctgattccgcttagtaagcttgtaattgttgcttacggcacaatgattttctttgtattagttgtgctaggacttgtagctaaatgggctggcgttaacatcttccacttattaaaagtgctaaaagatgaattgctattagcattttcaactgcaagttcagaaacagtattaccgcgtattattgcgaaaatggaaaagttcggatgtcctaaagccattacatcttttgttattccgacgggatattcatttaacttagacggatctactctttatcaagcgcttgctgcgatttttatcgcgcaaatgtacggtattgatatgagcatcacacagcaaatttcactgatattaattttaatggttacatctaaaggaattgcaggagttccgggcgtatcgtttgttgtactgcttgcaacgcttggatctgtaggacttccggtagaagggcttgcatttatcgctggaatcgatcgtttgttagatatgggacgtacagcggtaaacgtaattggaaactcacttggtgcgattgtcatttcgaagtgggaaggtcaatttaacgataaagacaaggaagcttatattaacgaagtaacaaaaaaagtatcgtaacaacaaagagtctgggacaaaaacattgtagttgaagaaagatccgaatgattattcgttcggatttttttatattgatgtagattttatctgtgcagttgcttctagttgttgattggagaacaaggcgaagattcccgcggaaagcgaaattttgtatggaaatcaaagcccgtgcaacaagtggtccatatcagctcatttatccaatttatccggctttagatgggatttatttagttatgtcttaatcttttttcggttgaatttgctttgggaaattgggaatagtaactaaagatgaaaaacaaatgattgatacaaggaggtctcaacatgggaagagcaaataatcacaaatcatcacataacaacaaagggtcactgcctcaaacaccaaaagagttaaaaattgctccagatcaagcaaatgaagaattttcacgtgaattagcgcagcatcatgatgctaaagcgaaacaggacttaattttgaaacagcaaaaagaaaagtaaaagaaaaagagcttggacaaaagtgttttaatcgaaggaaaatccgaacgatgaatggagaacccaactcgttcggattttttcattgtgattgtgaacgtagttttcgtttatgtagttgcttctagtggttgattgaagggcaagacgaagactcctgcgggaaaagcggaataggtgagaccccccaggagcgtacgcgacgaggaggctcagcgcccgcccgcggaaagcgaagtcttgcacggaaatcaactgccgagtaacaagcgattcatactagctcatttattcgtctgtaaattggattgacttaggtatgtctcaacctcttttatacatatctaaagataaaaattcctaagtaaccattttgtaacattatttaatcatagcgtaatagtttttgaggcttttttcattataattaaaccgaacatattgaaaaataagttcatagaaacgtaacgttcggttacataatggaggagaaaaatgaaaaaagccatcattgggtctataacggcagcggcagtcttatttagcggagccagtccgtttattgcacctgctcaaacagtagaagcagcgtcatattcatacaaggacacggctattgctactggtaagaaattaatgggtgttccttataaatggggaggcacaacaacaaaaggttttgactgctcgggatttattcaatacattttcaaaaaagctggaaaaacacttccgcgcacaacggaacaaatgtatcgagtagggacaagcgtttcaaaagcaaagcttcaaaaaggagatttagttttctttcaaacgtataaaaaaggtccttcacatgtaggcgtgtacttaggaaataatcagtttcttcaagcttctacatctaaaggcgtgacgattacatctcttagcaacagctactggaaagcacgttatattggtgcaaaacggatttaaccatccgtcatttttttggaaaacaacactacgttatgtagtgttgtttttgtttgcatatacataacatattgccgatattatttttaacgttttatacaaaaaaatccatattctatgagataataacgttaacacattttgtactttaacataaggaatatcccactctattcgaaagtctggtgagcgaagatgaagcgcttagtatggagttatggaataggtattgttgcaatagtagcagtactctcatttttctttatgatgaaaggtcaaacagagaaagccgtcgttagcggaaatgtaccaaaagctcatgcgcagggagaaagagtgaagcagccgatctcacagttccaagcagtacagcctcatgaagcaggtaatgaagtgaaaaatgtaaaaaacaacatgcctgaaaaagcggatcctccttcttttttagtctacattgaccctggtcatcaatctcaagctaacctggagaaagagccaatcggaccgggatcagcagaaacaaaaataaaggtttccggaggcacatcaggcgtagtgaccaagaagccggaatacaagctgacgttggaagcttctatgatattaaaacagctgctcgaagaaaaaggaataaccgtaaagcttactcgaagttctgataatgtagatatcagcaaccgggaacgagcggagcttgcgaataattcaaaagctgatctgcacgtacgtatccatgcagatggttctgaaaatacttctgtaaaaggattttctgtgctcactcctacagaagataattcctatacgaagtctatttaccaaagcagtttacaggcatctcaagctattctgacagaggtgaaaaaagatcagtttgtcgaagtggacggcattcgctatcgcagtgatctttcaggatttaactggtcgactgtacccgtaacgctagttgaactggggtatatgacgaatccagaagaagaccggaacctgtctgatcaggcttaccttacaaagctgatgaatcatgttgcagacggtatcgtggcatatgaagaattgaaaaaataaagggtgaaaagacctataaaaacgtgtgactaaatcatttgatttatgtcacacgtttttttgtcgttcatatgatataaagaagcgttttttcgacaaaaaaatggacgagcagaaaagaaaactaggtaaaatgctttaatttttatagaactgtgtcgatataacgagtgatattaaaatgcgttaggcagtatatgaaaatgggggaacaagatgagaaagttaacggcatttgctttagtactaagcgtactgctgtttcaattcacgccgcttgctagcgtgaaagctgaaacggtagaaccagttgtgtctgtaaaattagtaaactatttaggagatcatcatgcaattacaattaagccgtcttatttatacactattaaaaactcggatttggtcttaaatgcaaatacagagtatacggtaacagcaacaactcaaggtgtcactttaaaacaaggaagcactgtcttaggtgaatttacaagctttgaaattacaccgtctctttataaaaatcccgtatctattaacggcagacagtacttaggggacgttgcgtttacaaatgaaaaaggaacgtacgtcagacctgttaatacgctcccgattgaagactatttaaaaggcgttgtgccaaatgaagtctatacatcttggaatctgcaagccttaaaaactcaggcggtagcagcaagaacatacgcaatgagctatgcaggaaaagtaatcaatgacacggtaagctatcaagtgtacggtggctatacgtggtacgacagtacaaaccaagcagtagatcagacattcggacaagtagtcacctacaacaataaattaatcaacgccgtgttctcatcaagcaacggcggaagaaccgaatcaaacagcaacgcttggggaggaactcagctttcttatttcccggtgaaagaagatccatacgataagcagacaccgtggacgttagctattcaaaaaacgcaaattgatttaacaggaaaagatttagctaactatagcgcttggtggaatacggtttctgaaaaagataaaaccgttacggataatttgaagtcatggttagtagccaataagcatcctggtaaaaccattaaaattacgtctattccaaaggtgagcttttatgctccttcatcaggaggccgtgtgacgaaaggtgcaattacagtggactacctcgttaaaggagatgtagacagttcgcaaaaactagtggttcatcatttggaattaaaggatttaacatcgacgaagctaaaatcgatgttaaacagccgtgcgatgcttagtctgcttgtaacggaaacaaatgaaacaagcacatcaacaacttttaatggtaaaggaaatggacacggtgttggaatgagtcaatacggtgctcaaaaaatggcaagcataggaaaagactatcgtgaaattttagatttttattatccaaccactactcttttaagtttttatacaactaaatatccgcgaaaagagcaggagcaagaagcaccaaaagatacggttgcgcctgatgcaccttcagttaatgcactaggagacaatcaaacatcgcttacgggcgtgacagaaccaaatgcttctgttattgcaaaagtggaaaatgaagtaattggaacaggtcttgctgacgaagctggaaaatttgcaattacgattgccaagcagccagcagatacaaaagtatcggtaacgtctaaagatgcagctgaaaatgaaagcacggccacagtagtgaccgtaaccgatcaaacgccgccttctgttccaattgtaaatgaagtaagtgaccaagatacgaccgtaacaggcgtaacagaagcaaacgccgccgtgacggtaaaagcaggcgatgcaacgttctctgcagtagcggatggtaacggtacatttactgtttcaattccagtacaaataggtggaacaacaatagcggtaagtgcaaaagataaagcaggaaacgaaagtcaagctccttcttttgcggttaaatctacgttaaaagcaccgcttgcaccaaaagtaaatgcagtaagtgatcaagacacaatgatcaaaggaacggctgaagcaaatgcgacggttatcattaaaaacggaagtcttcagcttgcagcaggcaatgcagatgccaaaggaaattacagcatctcaattgcaaaacaaaaagcaggaagcacgctgtctgtaacggctcaaaatgcagggggaacaagttcagccactgcggtaaccgtacaggataaaacggcaccagctgcgccaaaagtaaacgcagtaagtgatcaagatacaaaagttacaggtacagcagaagcaaatgcgacggttactgtaaaagtgggaacaacaactgtgggaacgactaaagcaggtgcaaacggagcgttttctgttgccatttctctgcaaaaagcgaatacaaagctaagcgtacaagcaaaagatgtagcaggaaatagcagtactgtatcgactataaccgttacagcaaagcaaaaagctccggtaaaaccgacagttaatgaagtgagtgatcgaagtacagccgttacgggtacagcagaagcaaacgcgacggttatcattaaaaacggaagtcttcagcttgcagctggtaaagcggatgctaaaggaacatacagcatctcgattgcaaaacaaaaagcaggaagcaaactgtctgtaacggctggaaacacagcgggggtaagtccagctgtaaccgtaatcgtgcaggataaaacagcacccgttacaccaaaagtaaacgctgtaagcaatcaagatacagtcgtaataggaagcacagaagcgggcgcagaagtgcatgtgaaaattgacaaaaaagtaattggcaaaggaaatgcaaaatcggatggaacgttcagcatcaccattccaaagcagcctgctgctacaaaattagctgttattgcaaaagatgcagccaataactacagctccaatgcgtttgtaacagttagtgccgcgcagacaaaaccagcacttccaaccgttaatacgcttactgaaaaaagtacagcggtaacgggaacaggagaaaaaaatgcgtctatttatattaaagtaggcggaaaaattattgcgagtggaaaaattgatggaaacggcaagttcagcgtgaaaattcctgctcaaaaagcaggaacagaagtaacggccgtgctgcaaaataaagtagggtacagcccgtataaaattgtaaaagtgcaagacacaaccccgccggcacctccggcagtgaatgccgttacgtctttgtccacctttatctctggaaaaacggaagcgaatgccgtggttacgattaaaagtggtacaaagctgatcgcatcgggcaaagcagatagcaaaggacagtttaaagtcactattccaaaacaaaaagcaggcgtaaagctggctgtgacggcaaaagatgccgctggaaatacaagttcagcagtcaatataaacgttaaataaaaacaaaaaagaattctctgcggaggattctttttttagggatttttaagtgggatagaaggttactaaaaagttaccttagaactttgaagtgcctaacttactttaaagtgggttctatctttttctttttttctgtttcataataacaaatgtaaagaaattagcagggggttttttataatgagtaatcatttgcaagatacagtaacacttcataacggagtcaaaatgccgtggtttggattaggtgtatttaaagtagaagaagggcctgaattagtgaacgcggtgaaaacagctatcgtcaaaggctaccgcagcatcgatacggcagctatttatggaaacgaagaaggtgtaggggaaggaattcgccaaggtctaaaagaagcaggtctttcacgcgaagacatttttgttacatcaaaagtttggaacgcagatttaggctatgaagagacgctggctgcttacgaaacaagcttacaaaagcttggcttagaatatttggatctatacttaattcactggccggtagaaggtaagtataaagcagcgtggaaagcattagaaacgctttataaagaagaaaaagtaagagctgtaggtgtaagtaattttcaaattcatcatttagaagacttaatgaaagatacagacgttaagcctgttattaaccaagttgagtatcatcctcgtttgacgcaaaaagagctgcatgctttttgtcaaaaacacgatattcagctagaagcatggtctccgcttatgcaaggagaattgctagataacgatgtgttaaaagaaattgctgaaaaacacggtaaatcagttgctcaaatcattctgcgatgggatctgcaaaacggagttgtaacgattccaaaatcaacaaaagagcaccgtattgttgaaaattcatctgtgtttgattttgaattggatgctgaagatgtaagcaaaattgatggattaaatcaaaatcaccgagtaggtccagatccggacaattttgatttttaatagaagaactaataggctgggacaaaagtattttagcccaagtgaaaaacgaaccattgatcaactagtttgatgagtggttcgttttttttagggtgaatacagcttcatctgtttcgtccttccagctgttgattgaagggcaaggcgaagccttgcatggaaatcaacggcggtgtcataagcggttcagctcatgtatctcatttgttcgtctttaggttggattcatttagttatgtcccggcctctttttatgcattattacataaatttaacattttcttcacagtaagctaaaggacgggccgtatgataaagaaaggtcgtgaaagatagagaaatcatttcatttttaagtgtaaaataggcggtgtaacgatgacaaaacaagcttactctcacatacaatgtaaaaaaacatcaatgattgatttattgctggatgcaggggtttataaaaaaggaaataagcagctatatgagcttacgcttcaagaactagaatcagaatacgaagccgttgcacaacagcgcatatctcaatgaaattttgatacattgctagaatttgttataatagaggaaaggataggagttgatttatatcgaaaagcacccaacagactcgcagcccatccgtatggatatcctcgattctatatttgctaaaatggtattaaataaggctatccgagattttagaagagatcaaattttacgtgaagtcgatcaaacattagaagaaagaaacaaagagaaattttttcaattaattgaagaattaaaatcaatttcgtaaagagcgttcacgcgatagaatttgattttatcattttagcatataaaaacaggtaagaagcggcatgcttagttacctgttttttgttgtcttattataaaggaagaccttacataagaaatgaaccttatcagttaacagacaaaaagagcaagtctaatgtactcactcttttcagaaaggtatgggtgttgctgagaaaatgaatgtcactctctaaatgttgcgtgtggggtttagaaagttctatgccactgcatattttctaattcattcgctctatgtattgttaaagtaacaatataaccatatcttatcacatgaaggaaattcgattcaatatatttattgattttctttttaaattgttctaaataattagtgaatgtaaaaaaatgtttttattaggtgaatgtgtatctataaaaaaacaatagaaaaacatagtgagtttttatgagagacatttgtttatttctgacggactgtaagcttcaaaagagtacaatccgtcctgtaaatcagtattaagaaaaaatgagctgaacccagtagaataggaggaaaagcgtaacgatggtggtaagcgggataacgataagtgatacttttaaataatctttccattttaccttgatatgattttcttttaaaatatgcatccaaataagagaggccagtgttccaatcggcaataaaagcgagcccatatcacttccaataatattagcaaggtaaatagttttaagagtaataggatcgagccccatttcagtcaaggtaatggttccgaccattaaggcagggtgattgttaaacaagttagagagaatggaaacaagtcctcccatgataaagcttgcttcaaaaagccctcgattcacaattggttcgcaaatttttacaagtagatctgtcaatcctacgttatgcaatccataaataataacgtacattgaaaatgcaaaaacgaaaatgtgccacggcgttttctttaaaatatcaatcgggtttgtacgtaagtgataccatctccaaataagtaagatcaatgagcctagtacagcaaccaattcgattggtatgccgaaataagaggcgacaaataggagacagcgcataacaaacacaaataataaaactttcagcataaattgtgtgcgtttacgttttgtttcaacagaaatgcttccttttaaggggtgaaactgtttcgtaaagaaactctcttctatatcttttgaagcatgcggcagtttttttggcaaatggcgttttacgaccgtatacatgagccaagacataaataataaaccaagtgtcgccggtacaaacatcatcgccgtgtgcatataaagcgacatatgaacaatttttaaggcaatcaaattgacaatattacttacacctataggcgcgctggaagcggtagcaataagcgctccacttaaaaggtaggggatctgctggtggggttttagctgaaggtttttcaaaagtagaattaaaattggagtggtaattaaaatactgccgtcattattaaatagtaaagtcattaaaaagcacagcagttgaatgtaccaatataatcggtaccctgagcctttggataaactcactagtcgtgcagctgcccagtggaagaatccaaaactttctaatatgacggccatgacaatggtggcaataatggtgatagaagcgccgcttatctttccgaaaatatcaacgatgtctgatttggatacaattcctgtaagcaggataatggctgctcctatggctgccggccatgcttcgttgatgccgtttggcctccaaaaaatgacgagcattgtcattgtaaacacgaaaatggcaattccaatttcaatattcatcagtatgctcctttcttctaaaatttgtaatgaatatacccttgcatgtcccttacactctatttatattcatttattactagaaggattgtgcataagaccatttttgctaatatgtttgtttatcttgccaaggcacgtatcacctcgggagaggagcctataaaaaagaggctgggacataactaaacccatccaatctaaagagaaatcaatcggataaaggagctagtaggcattgctttttaaagtgctgttgatttccatgccagcctttgctttctgcttgtcccgcaggagtcttcgtcttgtacagatagaagccgctatatacatgaaacctacgctcaccatatcaataaaaaaatccgaaccattcatcgttcggattttccttcagctgacatacttttgttccagcctgttcaagattagcaagtatagactttttcgtgtaaagttagcgcttttatctgatcgtggtcaggttcgtagccgatgcctggtgtatcaggaacggaaataataccgttgtcgaccgttatttccggatgaatgatatcacgcggccagtatttagaggatgcagctgtatctcccggaagcgtaaaattggcaagtgtggtaatggcaatattatgtgctcgtccgatacctgattcgagcataccgccgcaccatacgggcatatcgtgagtttgacaaaggtcatgaatttttttggcttctgttagtccgcctactcgtccaattttaatgttaataatttgtgtgcttccaagtttaatagcttttcgaacgtcttcagatgaatgaatgctttcgtctaagcaaatgggcgtgcgcatgcggacctgcagttcagcgtgatcaattaaatcatcatgagccaacggctgttcaatcatcattaaatcaaactcatcaagctgagcaaggtgatcagcatctgcaagcgtataagcagagttcgcatcaaccatcagcggaatagaagggaactcgtgtcgaaccgcgcgcgtcaagttaagatcccagcccggcttaattttaattttgatccgcttatatccttcatttaatccggcttcaattttgcgaagcgtttcgtcaatcgtaggctgaatgccaacgctgagaccaacttcaatttgacttttactgcctcctagcgctttagatagagagaggttttgcctgcgcgcatacaaatcccaaactgcgccttctaacgccgcttttgccatgtaattgccgcgaatatgagcaaagcgttgggatacttcgtcagggtgctgaatttctttctgttgaagcaagggaattaaaaaatcctccataatgtgccagtttgttttgagcgtttcttctttataaaaaggatccgcgcacgctacggattcagcccagccggatcgtccgtcttcgtcttgaatttctactaaaataaaatctcgatccacttcttttccaaggcttgtcgtaaacggatgaagtaaatccatttttaaatgccgtaaaataacgcgtttgatcttcatttttgcacctcttttttcgttaaaatataaaaatgaacgggtgcgctgctttctggatacttcataaagtctgttacttggaatccttttgcaaaacacgtttgaaatacgcgtcttgttcgcatacgccagtccaatgcaagagaaggagagacttctttcatttgctgaaacgcagatgggatagctacagacacgatgtcatgatccagccatctttcatcaatatctgtaacagaaggaaatcctttatccgttaacgtccattgagtaagcgatgcgtccattatttgatctggcgtatagagaggctgagctcgtttcgtatcctctaaagatgcccattctacaacgaatcgatcagaaggcaaatcagcatttaacggatcattcatgtctccgtagcagttttcaatataggtagaacaaatggctccaagctttccaatatttaaatacccgttcgcactttctaacggatcgtacgtccagctgatatatgaataccctatttttttactttcttgccgctgcgcatgcttaagcttagctccgatacccatgctgcggtaggcagggtcaactgctaatatatgagaacataagtagacgcaatttccgtcaaaccctggaaaactatattgaaagccaatcagcttttcatttagaaacgcaccgagaacaagacctccgtttttaacagcggttaaggtttgatgaacgggcgttgcttcttcttctccccagacgcggctttctaatgtgcgtacgtcttctagttcagcggttgtggtaagtgaacgaatcgttaaagcttcagtcatatgtttacttcctttctattatctattctaaaaagatgttttgctcagcatagagcttttccaagtgttcctgtctttttccagccgttttttcatctcttttttgcatgctgctaatgacaatttgagatagggcaagaagcgataaaatatgttcggttgtgccggctaaaagcgtgatatcagcgatttgacctaccggagacagacggcggtctgtaatggcaattactttcgctccttgttttttagcttgctgagctacttcaagcgcttcttttgtatagcgcggcagtgaaaatacaacaacagcagattcactagtaagattgcatagcgtttcaagcaaaaatcctgttggaaaagataaaagaacatgattgcgaagctgattcattttataatacagccagtaagctgccgtatgagattcgcggaaacctgcaatatacacttgatcacttttgataagcgcatctgcagcttgagataattccttttcgtcaacaggggaaagccattcactaaaaggtttcttttcttctgctgcagaatcagctgcatgcttgctagctgcttcttttgattcggcagaagaaagccattcttttcgcattagctcctgtaaatcggaaaaaccatttaacccaagtgcgtaagctagacgaataacggttgtttcactgacacctgcttctttgccaatttgcccagccgtgtacagcgagcctttttccgtaaaattaacgagaaactccgccacttttttttgaccgcgagaaaggtcaggaaatttatgtttaattaattcttgaaatgatggattcatatagcctcctaaaaagaagttataacttcataaaaatatattaatgcatttttaacttcatttcaattgctgtttcaaaataaaaagaagccctcgtgatataataaattgattattcaaaaataaatgccattattcaaaaacgaattgtgttttattcaaaaatgaatagaaagcggggagcatacatgaattcagaatggaatgaaaatcagtggatccttcattcattaaaagatgatttgcttgtgacggatgaaaaaggcatcattgtccggatacatgaaggaacgggaaatatttacgacgtaaaagctgaaaaactgctgggaaagtctgtttatgaacttgaaaaacaagggttgtttacgccaatcgttacgccaattgtgcttgaaacaaagaagaaaattacgcttgtacaaacaactaaacaaggcaagcaagtgctcgttacaggcattcctgtcaaagatgaaaaaggagagattaaaagaatcgtcagctattctcatgatgtgacggagcttatggaaatgaaaacatatcttgatgcgatggaaggcgaaatgcagcgcgtaaagagcgagcttatgctgctgcggaaccaaaatctatcaacagaaggaattgtatgcaacagcgaaaagatgcagcacgttcttcgtacggctgttcacgtttcgaacgtagacgtaaatattttacttttagggcagtcaggagtaggaaaaacgcacgtagctaagctgatacataacaaaagtacaagaagcaaagggccgtttattgaagtgaactgcggggccattccagatcatttatttgaggccgaactgtttggctacgaagcgggtgcttttaccggtgcatctaaaaatggaaaggtgggactggtcgaattagcagatggaggtacgctttttttagatgaagtcggagaactgtcaccggcgcatcaagtaaaaatcttaaagctcattcaagaaaaacagttttattccgttggcggaagaaagcctaaaaccgtggactttcgcctaattgcagcgacgaacaaagatttagaaaaagccgttgctgaaaaagaatttcgagaagatttatattttcgtttaagcgtcgtaccgattaccattccatctttgaacgagcgccctgaagatatttttccgctgctcacacattttgccgagcagtttgaaaagaaatacaaccgaaaaagaacgtttgataatgcggttattcacgcactgcttgcacatgagtggaaaggaaacgtacgagagttaatcaatgtgattgaacacgccgtggttgtgtcttcacaaacgctgattacaatggagcatttgccgcattctctgcatagaaaaaaacggattcaacacgttgaagaacatggggaaatgaagcttaacgacgcgttaaacgagctggaaaaagagatattagtaaaagcaaaaaaacagtataaaacgacaacagaaataggggaagcacttggaatcagtcagccttcagttgttagaaaattaaaaaaacattccgttttttaacgtctttggcacgctctttgcatgtaaaacaagtacaaacacattacttgatagattgcgaggaggaagtcagatgacgcaggcatcacttacacagttaatgaacagtttaccagatttactagcaccaagcatggcgaaagatcaccctaatttacccgtggtaaaagcagagggctgctactactacggagtggacggaaaaacgtatttagattttacatcaggtattgcaacagcgaatacaggtcatcgtcaccctaaagttgtacaagcgattaaagaaagcgttgatcatcttatgcacggcccgtcaggtgtgattatgtacaaatctattttacagcttgctgaagaattaaaaacagtattgccaagaggattggactgctttttctttgccaacagcggaaccgaagcaatagaaggagcgttaaaactggcaaagtacgttacgcaaagaccttatacggtttcgtttacgggctgctttcacggtcgttctctcggagcgcttagtgtgacgacatcaaaaagcaaataccggaaatttcttcagccatcgggcttaacgtatcaagtgccttatgcagacgcgactcagtgtccaaaaggagaagatccggaaatctactgcgtggaaaagctggaaagagattttgacactttgtttaagcatcaagtaactccggaagaagtagcgtgcatgattgtagagccggttcttggagaaggcggctacgtgatccctccgaaagcgtggctgcaaaaaataagagaagtgtgtgacagacatggcattctgcttatttttgacgaagtgcaaactggctttggacgcacaggcgagtggtttgcagctcagacgtttgacgtgacgcctgacattatggcaatcgcaaaaggcatagcatcaggacttccgttaagtgctaccgtagcttccaagcagctaatggaaaagtggccgattggtacacacggaaccacttttggaggcaacccaatcgcttgttcagcagcgcttgcgacattggacgtactaaaagaagaaaagctgattgaaaactcaaaagaaatggggaaatatgcagcggatcagcttcagcatttgaaagcgaagcatgaagttatcggaagtattcgttcagtaggattaatgattggaattgaaattattaatccgaaaacaaagcaaggtgacggaagccttcttcttgagattttagacaaatgtttggaaaaaggggtgctgttttacctttgcggaaatagcggagaagtaattcgaatgattcctcctttaacgattacaaaagaagaaattgatgccgggcttcgcgtgttagacgaagcattgacagaaatcacaagtcttcacgtgatctaaagctttagaaagctctttgtttcaatgaaagatagattgacccataataaggaggaatctgttatgaacggactggatatgacggttatgtttgtctattttggcgtattggttgtagctggtatcattggctcgttaaaagcaaagtcatcagaagattttattttagccgggcgaaacttagggatgttcatgtatttaggatgtttgtctgccgttattctaggaggagcgtcaacgattggaacggctcagcttggctacgagcacgggctgtctggcatttggttcgtgacgatgattggacttggaatcattacgcttggcacgatttttattaagcggatttcgtcgttgaaagtgaccactatcagtgagctgctaggaaaaagatataacgctcaagcgcaaattatcagcgccgttgttgccgctatttatacactcatggtatcagtcactcaagtgattggaatgggaacgatcattcatgcgttgcttggctggaacatgacggcatcaatgctaattggcggttcgattgttttgttctacacgattttaggcggaatgtggagcgtaacggtcactgatattattcagtttgttgtgatgacggtcgcgatttttggatttatgcttccaatgagcgtatcagaagcaggaggtttcaaagcgcttgccggagatttgccatcatcttattttgatttttcatcgattggatacggtcaaatctttcagtatttcctcttgtatacgcttggtatggcagtatctcaagatatttggcagcgggtatttacggcgcgaacagaaaaaattgcgcgaaacggctccatttttgcaggtgtgtacagcattgcctacgcgattgcgggaagtgtaattggaatgtgtgcgtatttgctgctgccaaacgcagaaagcagtcaaagcatatttgcgacgcttgcagttcaaattctgcctcaagggttattaggtctcgtgctggcaggcgtttgttcggcgctgatgtcaactgcttcaggaacactgcttgcgtcttctacgctgattagtaacgatattattaaaaaagtgtggcttaaaaatatttcagagaaaaattatttaattttaacccgtgtgaatacacttattgtcggcgtgcttgctattatttttgctctttggattcaagacgtgcttgttgctttagacgttgcgtatgccattttatcaggagcgatttttgttccgtttgttgtgtcgctgttttggaaagacattcatccaaaagcaggagtttcagcgattgttgttagtacactagtagtacttggaggtctattgattgaaggactttcttctactacgccaatcctgtacggaatttcaagcagcattattataatggctggatttgcggttatggctcgaaacaaagaactgtctgaccaagagccggtaagcgaagatgtaaaataagaaaagaaaggcttctcctttacggtgagaagctttttatattcctgcttattattttagccggtaatcgtacatactaatggatattcccaaagaaaagagtgttacaaatggaacgaacactgctaaaagggctaactgtgttgtgtgcagttctttttccttttgttgtaaaaaaaccgaaatttaaagaaatgctgattgtcttttttgcaaaagggattttggccacgcttattgatgcttatgctgtaaacacgaatcgaatcaaatatcctgttcggccgtatcctcgcattttttcaactaatattttatatgatctgctgttttttcctttgctaagtatggtttgggttagacaatcttatgaagacaagcttcctgcaatcttactaaaaagcttgatgtggagcgttccgatgagtatcagccagtggtatttagagagaaatagcaatctgtttaaatggaaaaagtggaccatctttcatacatttgcaagtgttagttttacattgctgacaatcagggggttagctggccttgtcaaaaaagcagataaaaagctatagttcagctttttatctgcttttttatgcacaaatctagacaacatctatcaagcaggagtaaactaaatgctcagattatagagataaggagattgttacatgaaaagcagaacgtccgtaatggttagtattgtgctggcaatgctagtggcttcgcttgattcaacgataatgaatacgacgatgcccgttattgcaaaagagcttggaaggtttgatttgtacgcgtggtcgtttgcttcgtacatgattgcaagtacgattttatctccggtagcggggagattatcggatttatttggccgcaaaaaagtatttgggtttggaattattgcttttttaattggttcgatgctttgcggcgtggcgaatacgatgattcagcttgttcttttccgtgcggttcaaggaataggagccgggtttatggtggcctttcccgctattattgccggagacttatttcctgtagagaaaagagggaaaattcaggcgctctttacaacgatgtggggattatcagctgtgttggctccgcttttaggcgctttttttgtggattatttaacgtggagatggattttctttattaatttacccgtatgtattgtttcatttctgacgttaatgccatatcaagaaagctataagccgaaaagagcaaaagtcgattacatcggtgccattttgtttggagcgggcgttacgtcgctgctgctcgttacggtagtggaacaaaaccgagttgtgtatgcagtagcgggacttattttattagtgattttttatctccatgaacgaaaacatgcttctccgattgtcccgctgtctatgttccaaaacaaaacgctgtcatggattaatatcaatgcgtttattggaacggtggctttattcggaacgtcaagctacattccgttatttttacagcgagtagcgcatctgtcactgtttatgagcggagttgcgctgttaggaacagctgttggatggatgtctgtgtccgtgccggcgggtaaatggattttaaaacacggctacagaaagctattgttaattggaaatgtgctgctggttggctcaggaacactgctgcttatgctaaatgaaagtcacggtttcttttatgtgttttgcgtcatgattgtacaaggactatcgtttggactgctttctacggttggcgtcattggtgtacagcaattagtaggcggacatgaaagaggtatttcaacgtcattttttatgttttgcagaaacatgggaacagcaatcggcgttaccattatgggtgctttgctgacttcaggcggaagctttatggcgggcattcatcacttgtttttatttggctttgccggaagcatcgtggcgttattaacttccttaaaaattcaaaacgatacggaagcaaagcacaatcgagctgctagttgagggaatttatgctaaatatgtttatttcataaaaaaacgggaagaaaccaaataaggtcatagaattgcctgataaatcgtaggcatattcttcttcttctttcacttactacatgtgggacgccgggtatcggcgtctttttttgcgtggttatacgcaggttatataacaaaacgaatatgtaaagaatgttaaatttaaataatgggactttttacaaaaataagtctttaaatggcaaaaaacattaggtataatttagtagtcatttagcatattttagaaatgtttgactgagtttgtacgaaaaagtgaaaggggatatttcatgtcatggctcaccaaatggtcgttcaaaaacaaagcggctattaccattatgtctattttaattttagctttaggagtcattagttattttacacttccaatggagttcctgccgaccgctgatcagcctcaagtgtcagtagtggttatggggcaaggaacggatgcagactcgatggaaaaacaagtgacgtcaccgattgaagaagcggtagctggtgttaaaggaaaaagcaacgtgtattcgacgacgggagacggctattccaaaatcgatatttcatttgaatccaaaacggatatgaaagaagcaaaaacaaacgtccaagaagcgctgtcttcggtgcagcttccagccagcgtatcaaagcctaatgttattcaattaaatacctctatgattcctatcgcagatatttcacttacatttaaagaaggattaacaagagacaatctggatcttgcagagaaaaaactgatccctaaatataaagacgttaaaggcattgcgagtgttcaaacgtatggaacagcggattcctacgtgtctattaaagttgataataaaaaattgtcacaaaagaacgtgacgattgataaagtcatcagcgtgttagaaggaaaaaacacgtcgcttgcagttggagaaaaagtcattaataacaagtcgagcaacatcaacgtaacaggtaaaattgacagcttggacaaagtgaaaaagctgccggttgcaccgaatgtaacgctaggggaccttgcaaaagtagaggtgaaaaagcctgaaggcgtcgtgacgcatattaacggaaaagatgcacttttacttattgtgacaaaagacagtcactcaaacgccgttagcattacaaaagaagtaaaaaaactgtctcagcaaattaacaaagactataacaatgtgcacgcttctgtattttttgcaacaggggacagcgtacaaaactctgttcattccatgatgaaagaagtgttgctaggcgcactttttgcgaccgttgtcatcatgctgtttttacgcagcgttcgctctacgtttatcacaattgtatccattcctttatcgctttgctttacgctgttcttactgtctaaatcaggcgtaacgctcaatattttaacgcttggaggagtagcggtagcgattggtaggttggtagatgatagtatcgttgttattgaaaacatcttccggaaaatgcaaaaagaagagttttcgcttggtttaattattgatgcgacaaaagaagtaggctctgctattaccgcttctacgttaacgacagtagctgtctttttaccaatcggccttgtaaacggagggcttcaggactttatgcttccgtttgctctaacgctgacgtattcactgctgtcttcattaattgtggcgcttacggttgtaccgttaatgagtgcgggattattaaaaaatgaaaaacttcgcaagcacaagcagccggttcgttttacaaaggtcattacgtggtcgcttaatcataaatgggttgtgctgctgctttcgcttcttttatttgtcggatctattggcgcgtacacaatgatgcctaaaggagcggttgataactcttcatctgactttgtaagcacaacgttaagctatccaaacaacacgccaattaagaccgtagaagaaaaatcactgcagcttgaacgctatattttagctcaaaaagaagtaaaagaggtatatatgcagcttggtaatacggatgaaggagccaagtggggagacgttggttcgcctactgaagctacgtatacgattatcgtaaaagacagtggaaacattgattcgctgatgaaacgaatccaaaatcaaaagaagctctatgacggaggcgatcttagcgtcagtgctgcttcactcatgggagcgtccactacttccattaccgttgatgtgattggaaacgacatgaacaagttagaaaaaacagcaagcagcattaagaaagaaatcagcgatataaaaggagtagacaaagtttctacgaaccaagacgaaaagaaaacgatttactctttagacgtagatccaacaaaagcgaatacgcagcaagtagcgcagcagcttggcgttatgctgaacaaaacgccgattggagcgatagatttagaaggcaagcaagcaaacgtacttcttgaatctgtcttaaatccaacgtcaccaaaagagctaaaagatatttctattatgacagagacaggaccgtcgcctgtttcaaaagtggcttcgctaacgcaagctgaaaagccgaccaatcagtttcataaaaatggagacccatatattcaagtaacagcagatgtcaatccagaaaagctttcagagattaataaaaacatccaaacagcgatttttggagacggtaagagtaaaggactgtcgatttcaaaagatgttgacgttgtaattggaggagcaagcacgcagcaaggagaagatttctctgacttgttcattacgatgctcgtgtcaattggtattgtgttcttaattatggtgattacgtttaaaacaatccgcacgccgtttgcgattttattctcacttccgcttgcagcaatcggtgccgttttagggttattaatcagccgcattccagtagacgtaacagctctacttggagcactgatgctgattggtattgttgtaacgaatgccattgtactattagaccgcgtgaagcaaaatgaaaagaaaatgattatgcgcgatgcgattgtcgaagcagccgctacgcgtatgcgtccaattgttatgacgtctgctgctacgatttgtgcgatgctgccgcttttatttaaacaaagcgaaagcggaagcctcgtttctcaaagtctagcagtcgttgtaatcggaggattggccgttgcgactcttcttacgcttgtagtcattccggttgtatatgaactgcttcatttcagaaaatcgaaaaagcaaagaatacagcaaaaacaacaggaagacgtaacgccgctataatgtttaaaagaggttaggacataagtattttagttgaagaaaaatccgaacgatgaattgagattcttgagagagaatccgactcgttcggatttttttattggtaaagtgaacgtaggtttcatgtctctagttgcttttagttggtgattggagggcaagacgaagactcctgcgggaaaagcggaacaggtgagaccccgcaggagcacaagcgacgaggaggctcaccgtccgcccgcggaaagcgaagtcttgcatgggaatcaccagcggtgtcacaagcggctcagctcattctctcatttgtttgtctttagctggaattgatttgggtacgttccagcctcttttttatgaaacttttggctagtaaaacgtatagttagataaagaaatggaggggataatatgtttggaacaaaagagcagtgttctgtttgtcaaaaagaaattcagccgaatgaagaagtatggacgcggatgaagtatccaagtaaaagaggcatgaccgaaattaaagcttttctacatcaagaggcgcagtttgtatgcatggactgttttgaaaaaacaaaaaaatgagtcaaatgcacatgttctcttttcaaaatattgacatagtatattttatagtttaatatttagataattatctaaatacttaaatacgatggagatgaacttcaattgaatgaaacgtttaaagccttagcggatcctactcgcagaaagattttagagctgctaaaagagcgggatttaaccgcaggagaaatttccgagtattttaatatgaccaaaccaagcatctcaaatcatttaaaaatcttgaagcaagcagacctcgttcaagatgaaaaaagagggcagtttgtgatttattcgttaaatacaaccgtttttcaagatttaatcggctggtttttcagctttcagaaaggagagagttaaatgaaaaagcacgtatttcctttaggcattacccttttaaccctggttgcatggctcattgcactgccacacctaccagctacgatgcccattcactggggagcaaatggagaagcagacggatttgcaacgaagatcaacgcaatgatcttaacagtaggcatcatggtactaatttattttatcatcgcatttgttccgcgaattgacccgcgtaaagaaaattataaatacttttcaaaaacgtataacatcgtgttaaacgctgtactgctattattcttttttgtaaatatgagtactattttacaggggctgggctataacatgccgatggcgtacattgctccgattatggctggactcgtttttatcattattggaaactacttgcagcgcgtgcgctcgaactattttatggggattcgtacaccgtggacattgagcaatgaaaccgtatggaaaaagacgcatcgtttatctggaaagctcttttttatcggcggactgctgattcttattagcgcttttttaccagatggatacaagtccgttatcatgtggggtagtatcgttctgtgcgtggcgattccttatctgtattcgtacttggcgtataaaaaagaaatgaatatgtaagcatacaaaaaatccggtgaacataccggatttttttatggataatatatcagccgtaacgccaccgttcgtgtcacgccggctgttgggaataaatacagcataaagtatgaaacgcgtttcaggtcaagagccgctatgaaaaaacttacatttgcttacgatcacttgcttcaggcggcttttcaatccacccatttttaatcatcacttcactgcagcgccccgctacttttaagtctcgtaaaatacacgcttcacagtgcccgacaatatcgagcctcatgcttgtggtcattgccgttgcgtaataagtaatggctactttaaacattgcgcctgcgtgaaacgtcatcagcttttctgaaaaaggcgcatgcgtagacgttgtgatttcattatccaaaagcggaggcgtatgaaggttttcttcgtgcataatggaagaataaagctcaatatgcttgtgggccacatcaagaccggtctccattactttcttcacatcttttcgtttgctcacttgtttaaaagcaattaaaagcgctttggttgccatgcttttgcgtaaattaaaataaatattcccggcttccgttgtgtttaaaaggcgctgcttgccgacaaaatcaagagcgtaagacaaatctatgatcggctcttgtttttttggatttaaaaaataaggagcaggcacataaagattttttgctaaaagcaaatcgagcgaccgattgtagatttccatcgcatctaaattacatttatgataataatctcgaatatctcggcgaaccgaaacgctaaatgaaatgccataccctgacaagccgtgaatagtcatgtcgtgaagatacttcagccaaaacgagtctgtaaaaagaggaggtgcgtgcaaatccacatcttcatctgtaaatccgttcggcagcggaaaatgctcggcatgaaaaatggcagtaagcagcttaatatgcttttttgataactccagagaaaaggcaaacagcgaccgaatctcggcatccgttaccgttgctagaacgtgttttgctacgcaagccgccagcgtatcctggtgatactgcgcgcatagactcgttatttcaggcgaagtcaaacgcttgctttctgcgttcaattggctttcctcctatctataaaaatggtacgtatttataaaaaacagataagtatagtgtgaacaagggtgtgttaaattattccacatttaaattgaaaccaaaatagaaaaaagacctgctcggtaaagagcagatctctatgtattggtttattttttattcatttctttttcaatttcagggtaggtaatgccgtattttttagagacggtaactaaaccgataatttcttcttcagtaggtggtccgacttgcggcagaggagcatttgcgggaacggaagtaccgagttctttaacgaatgaatcaaagcctgctggagaagcagtaaggataaattccgtttcttctggtccggtcacaaagcggtgctgaatacctttaggagcaaaaacataatcgcccgtttttgcttcaattatttcttctcctatgtaaaaaatcattgagccgcgctttacgtaaaacgtttcgtcttcatgttcgtgaagatggagcgggggaccttggtttgctggtttcactacgtgtgccacggcgtaagctccgtttgtgtcttcacctgatacaagaagcgttactttttcatcaagaaaatgaaatgtgttttgatcgtgcggcgtacggtgaaaagcgtttgttagctgattatgagttgttgtcatccttttatctccttaaaaaacatattttgagattattgtatactaatatgaacgttttgtgtgcaaataatagtcaaaaaggattatttatttacatttattatctttttgtagttctaatgttattgattatggattttttatagaattctctttatctattttccaaaactacccaatatgctaacataaatatagaattcctaaatggacaagtgatgtatcagatgtaaaaggagagttttgatgaagttgtttaaagatgcttctaagcagaagcatcaaaattggaataaagctgtgtcggcaggtttttatattcttttattcttgctttttgtgaacataataatgtattcctataatcgtgccgagttaatgtcgtcgctctcgatgttttggacaggaatcattgtgacgtttggctatcagttcattttaaatagaaaaagtgaggaaaaatgaaaaccagccttggcaccgttcagaaaagtttctgatgctgctgtgcttttttgcgccacccattggttatatagcggtggtagtaaataagaaaaagctaagccgagaacagtggctgagtaacttaacggtagcaactattatcatgtccatatggctgctgaagtttttaccgcatcagtggggaacgattattttactaacgggagccggaatctactggtatcaccgaattttgaagaagtttaagaaatagcggcagggataaagaaagttaaattttacgcattgatattttcacaaaagcagttaaaatattatagtaatacaaatttgttctacccatgtaaataaaagtatgtatttaatatgttttataattagttaagaatagagccaaccaaagcggttggttttttgtatgagttcattctctttttgtggaaattgaagaatagtatccgatgtaaggctagagcatacaggcaggttttaaaactgtcggatcagttctttaaacaggaggccatcactagtgtcgataaagaaaaagttgtccgtattctttactttgctggtattgtgtattctactagcgaataacaccttgcactacattcgatcaaaaaatagactaacagagtttaaccaaagggaaatcacgctggtcacagaagaaattgcgtacgaagtcgaaaattccaaaaatagtgcttcctatatggaagatcgaatgggacaagaattacgaacggcttcaattgcgattcaacagtctttacctgctgattatcatgacatcagcaacgaccagttaaaacaactggctaaaaaactgatggtatctcatattacattattagcacccgtagcaggtgatattataggggtaaaatcttctgaccctaaagaaatcaatatgtctacaaaagagtggggctattggtatacatcttttcagcagctgctttctcagcagccggtcacgacaacaaaaggattgactttacctcactattggagcgggccgattgaggtagcttctagtaatcctaatcacattgataaatggggttattattacgatgggtctactaattatattattgatccttatttccgggatcagcacgtcctcgattttgaaaaaaggtttggccctacgaacgtgatggaccgttttacggaaaatcttgaaggcgttcttgaactaacggcttttaacccgaaaaatttcggaaaaagaaatcaaaacgtatatttaaacggcaataaatatattagaataaaagatcagccaatttggtacggtacctacacgtatcgaaataccgaacgtgataaaaagtctattcaaaaggccttaaaaacggggaaatcacaaagctatactgctgaaatcaaccataaaaaagtattaaaaacattggtaccgattaaagaaaaaaactctccagcttacgtgataggcgtagtgtatgactacgggcttattgaaaaagagctgaagcaagaattaatcaaacatttactgctgtctcttccgtttatctttattgtccttattatcagctttgtcttctctacatccattacacggccgattaaacatattatggaacacgtaaatcaaatcgccaaaggcaattttggcaaggtgctgaatgtaagaagaaaagatgagctgggaggacttgtagcaaacatcaaccacctttctcactttttaaaaacatatgtggacgatttaaagaaaagtcaggaagaaagtgagtaccatgcctaccacgactttttgacagggttgccaaacagaagatattttaaagaagaattaaacaggcgcttagttgagtcgaaggaaaagtccattcgtcacgtagccgtgttatttatggatatagaccggtttaaagatattaatgacacgctagggcattcaaaaggagatcagcttatacagctgatagccaaccgtattaaagaatgtctgcctcctgctaacagctttcttacaaggcaaggaggagatgagtttgttattttattcagtgattttacaccggaagaagttgaaggtatcaccgagaagatcatggcttatgttcaacagccctgctatattgacagtgatgaagtgttcgtcagtatcagcagcggattaagcttttatccggagcactctgcgaatttggacacgcttattacgtatgcagatgtcgccatgtatgcttcaaaaagacaaggcggcagcaaagtaagtatttatcatgattcattaaatcaaaaacaagctgaaaaagttcacatcgaaacgcgcttgcgaaaagcaattcaaaaaggtgacattgacgtttactatcagccgaaaatagaagcgcatcgcaatgtaatcaccggagtagaagcattagttcgctggaatgacgcagagcttggatttgtttctccagaagtatttatccctatagcagaagaaaccggtttgattcagtctctatgggaagttgtcatgagaaaagcttgttctcaagtcagcaaatggaacaaggaacgaaacgaaaaaatgacgctagcggttaacttttctccgcggcagtttcaagatccaattgtgttggttaatgaaatacagcactttctttcgctccatagatttgatcccacatggtttgaaatggaaattacggaaagtacattgctgatgaacgcggaagaaacgattaaagctttacatctgttaaagaaatatggtatatcaatttctatcgatgattttggaaccggatattcttcgttaagttatttaaaaaaattaccaatcgattgtttaaaaatcgaccggtcttttatccagtatattcaagaagattacagcaatagcgaaattgcacgggcaattatcagcttatctcaaagcttaaagctccaggtaatcgcagaaggtgtggaagaagaatatcaaaaagcgtttttaatggaaaatggctgtgatcatatgcagggatacttgtttagcaagcctcttgctgcaaaagattttgaagcagcgtttttaaatagctgaaacaaaaccatcatttgaaaataaacttactaagaaaagggaagaggacataaagagatggcacttagtacacaaaatttaattgctcaaaaatttttagaaacactaggaacaaattcaactgaaatagataaaaaaatcggtcaagctgacacatttatgaatgcggtgaaagaactgattgatttatgcggagataatccggaaagagacggccttgaagagacgccgtaccgcgtgttaaaggcgtttttagaatacacggaaggctaccgagaagacccgaaagctcatttggaaaaaacattcgatgtgaatcacaacgaactggtgttaatacgagacattgaatttcactcaatgtgtgaacatcactttgcgccgttctttggcgttgcgcacgttgggtatataccggataaaaaaattacaggtctatctaaaattgctcgtacggtagaaggatatgcaaaaagatttcaagttcaagaacgtctaacaaatgaaattgcagatgcaatcgaagaagtgttagagccaaaaggagtcatggtgattattgaagcgaaacatatgtgcatgtgcggaagaggaattaaaaaatcttcagcttctacagccacttcatccgttcgaggcacatttatggaaaaaccagaggttcgaggagaatttttatctcttttacagcgacaaatgtaaagaaacaaaaagccatataagctgagaagcagaagcgaggtgagctgtatgcaacatgttgacgtactgattattggcggagggcccgctggcatctctgctgccgtgtggtgtaaaaggctaggcgttgagtgcttgcttcttgaagaacaggcacagttaggcggacagctgtttacgatttataatgaaattattgattatcccggaatacaagcggaaaatggaatcgaaatgcaacgcaaaatggttcagcattttatcgatatggactgcttatatgaagcgaatacaaaagtaatttccattgatgaacgttctaaaacagtaaaagtaaagcagcaagaaacagaaaaagaaattggctatacgtatcttattttagcaacgggctctagtcagcgaaagctcagagtgcctggtgagcagcaaatgattgaccgaggagaagtatattctgcttcagcagacggagaacggttaaaaggtaaaagggttgctctcattggcggaggagaccgggcgtttgaaggagcacatcttttagcatcaaaagcaaaagaagtatatctgattcatcgttctacgcattttaaagcaagagagcaatacgttgaaaaagttctttccgacccccgtgttaaagtgatgacagataccgaagtgacggctattcacggaaagcatcacgtcacatcgatcgatttaaaaagtaaaaacagtgaatgcgagaatttattggtagacgcagtgctgatcagattaggcatagcgcccaatgttgaactcattaaagaaaaagtcaccactacgcaaagcgggctcatcgtcatcaatgaagtgcatcaaagtagcaatccagctatttatgccattggagacgcctgcacgactcccttgttttctagtatcagctcttcggccggtcaaggagcgattgtagctaaacagttatcgagcatgttcaatatctaacattttgctagatatatcttacaaagccttggatataaaaataaaaagcatctatctttagcgatagatgctttttagcctgcaatgtaaaataaacataaaagaaacacgttcaccggcatacaaacggtttgaaaaaaagccatatagctttgggggacggatcctcgctttttgatgagaatatattcaatgataagatcaaagaggagaataattaaagaaaacatgacataaagcaatacgttttctcgaaacatccgtgtaaaaagtggggagaacagaagcaaaaaagtaagagtttgaaacgaacctctagaaaatagacgaaggttttttcgttggtggttcattcagggcctccttttactaggtaaatatatgttttattttaccaaatgtgtttacgctaatgagcccttattatatatttgattcgaaagttcctcatttggttaaattagggtaaaatatatgtcgaatgttaccaatagtagcttataagaagaagtaaaggggttttttatttaatgatttacagagacaaggcaaacaaaggagggagaaaagcgtcttgcaagataaacgagagttgaagaaacagtcaattgacaaacagattattaagcattttgacggtatgaatacacagcttctaaaagaatataatgagggcatcttttttatagattgtgtaggaaacgttatttttagcaataaagctgcgctaagactgataggaaatgattataaagaaaaaagtcagcagttaacagagtttatacatgaggcaaagcaagaagaagtgagaatttactttcaacgtgcattaaagggagagaaagttcaatttggtacaactatttatcataagacaaacaatgaaatgcacttatgtattactcttctgccaagtatcgtagacgatcaagtactaggtgtttatgcagtgtgccgggattattcaaaagagcaagagcagtttgcacaactatctaagttagaaactcatttgaaaatggaacaaaagctagcaaacataggaagctggtgttatgacgttatggaagatgaaagttattggtctcatcagctttataaaatctacggagtgaagcatgaccaacgattcgttccttcctttaaagaaggcgctcgttttattcatccacgtgatcgaaaaagattggaggatgcagttggtcattcattagctacaggagaaagttataaaattgaatatacgattatacggccaaatggggaaaagcgcatggtgttcgaacaagcagatgctgtagttgatgagaagagaaaagtagtacagctgcttggcgttgtgcatgacatcacggaatccaaggtgattaccaatgaattaaaacaaaaagagcatcagtttcaaactatttacaataacttagatgcaggaatatggtcagttgatgtgacacgcaacaaagtgattttatgctcagatgccgtattgaacatctacggagagaactctgcaaaatttcttgaaaacaggcatctatgggaagcttttgtttatccagaagataggccgaccattacaaaagagtacataaaactaatgcaaggaaaatccattcgtccccactatcgaattcaaacgaaaaaaggagaaatcaagtgggtgagagaccattgtatccctacttgtgatgagcatggtaacttaattcgtattgatgggattatagaagatataacggaggaaaaaaggtatgtagataaaattgaatatctggctactcatgactacttgacaaacctgcctaatcgaataaagtttgaaagagaagtgaaaaagtccattagtaaaatgaaagaaaacgacggttcattagctgtttttcattttggattagatcgctttaaacatatcaacgatacgttaggccacgatataggtgatcagttattaatgaacatagcgaaacgcctaaaagaacgtttggaaccaactgccatattagccagagtaggtgaagacgaatttgccgtttgctccacatcgcttgaacaaattggcgaatgtaaaaaaatagctgccatcctgtttaaagaaatagaaaaagaaatcatgattgacgatttttcgctttacgtaacagcaagtatggggatcagtatttacccgcatgacggagaagatgctaaaacgctatataaaaatgcaaatattgccatgcaccgcgcaaaagaattagggagaagcgactggcagctgtattctccattaatggatagcgctgcatacaaaagttatcatttagaaaaaggcttaagaaatgcacttcttcaagacgaattttttattgaatatcagccaaaagttcatgcacaaagcggagagattgatagtttagaagcgttgattcgctggaatcatccagaatggggccgtgtatcgccaggagactttattcctttagcggaagaaaccaatttgatcattgatcttggcgattgggtattagaacatgtttgtaagcagctgcagcgatggaagaaacaaggggaaaaagtggtaccggtttctgtgaatgtaccttccaaacgattattaaaacgggattttgtggagtacgtagaaaaaacgctggcaaaatacgaaatacagccttcatttattgaatttgaaattacggaaagctccatcattcaacatgaagaacatgtaaaaaaagtgatggaagaactaaaaaaaataggggttaccttcgctttagatgattttggcaccggtttttcttctttgtcacacctgaaagatttagagtttaatgtactgaaaattgataaaacctttgtccagaacatcggtgataaaggaaagcatcaagcgattacaaaaagtctattatacttagcacatgcacttgacatgaaagtcatcgcagaaggtgtagaaacaacagaacagcttgatttcttactgcagcatgactgtccgtttattcaaggctttatttttagtaaaccagttgggaaagagaaaatagaagagtatttaagagtcagatttctgtaaaacaagggtgatgcttcttcatagaggcatcacccttattgttaagcttcgattcgttttcgcagcgtccaaatctggtaaaacatataaagagactgatagatggtcaaatacgtcagtagaatccacccgttcattaagtacggataaatggcttgctgtacagaaggactcgttaagtaatcacggaaataaatgcataggacaacaatcatgcctgtaaacgcaaagcccgttaaaatcccttgccctaatttactgcgcgttttcccgttttcggcgttgtattgattcgcccagccgtcttttttattcgcagcaagcctttccatccatacttgaccaaacgtaatcaagttcacccataaataaatttccggactaatcaaaagaccggccagtatcacatcaatcggcctgtgcatcggcgttttgacagcgagcataatatttaagacagaagctaacgcaattggaataatccaaagccacgaccagtaaaattgatcggtcgcaagcgcagccgataacaataaaacaaacagcaggcgaataagtaaatcacaaagcgttttgatctgtgaacgccacagctttcctttatgcttggttctaacgtccaagtttccatttgtcagtaaatcgaccgtcccagacttccatttattacgctgttcacgatacgtgtgatagcttctcatcgagtccacgaaacagcgagcgcctggactgattaacgttttccaattggatttttgcagctgccatgtcagaagcatatcttccacgtcgctgtcattttgccaaggaccgtcaagcttattttcttccacgatattttgaagcgcttccggtcggaacagcgtagcctgaccgccgagtacatacgtgcttccgccgtggtactgaagatctaacagccagctcgccatatcctgcttttgctgatgggtccaccaccgagctatcggtccgccgtactcgccgcttgcgagcttttcctcgtagtgcacatcatcttttgagagcgagcttttctttttaggcattctcatcgtatattttgccatcacgccgccgatgtttcgcgacgtcattaaatcttcccataaattaatgagtgctttcggagctaagcggctgtctgcatccatccctaaaatcgctttaatcgactctttatacagctgctgatatttcgtcagcgttgtattgtataaatccagtgtatctccatatatctttttccaagccgtatttaacgcgccgacttttcgttgtttattaccttcagtgaccagtacttttacatttaaatcaaattcatctccggccagctccgctttttcttttgtgcggtccgtacagttatctgcaatcacaaacacatcaagctccacattattcggaagaagctgatcgcctaaccctgccaagcagtcgcgaattgatttctcttcattgtgcgccggaataaaagccacaatgcgcggcctcatatacgaagctccaatacttccagtaacaacacgctgattgttcatgttttcctttaccccctgatgtatcaggaaacccagccatcctagtcctatgaccttagacctgaggttttgcgtcccagcctttcgactggtttgcctttaactgaacaagttaagttcaccactctttgttttctttaaagaacgaaatacctaaaatgatactatataacgaatatcttttttagattttaccataaaaataggttgaattaccctaaaaatgttcgacaaatttcgatagaagtaaattaaaaaatacagataggggcttatattggttatgtatatagtcttgtttatgtaagttaaaagttggagagaagaagcgatgaaaataagaaaggtgatggttgatttctgactctatataatcttgcagataggctacttgctaatgaccagagcttaaatccggttcgggcagaattgtacaatagaaaacgaatggggaaggtttttaaaagaaacgtaaaaaacctctctaataaacttaaattgattagagaggttttaataattatattttgtatttatttttttacctgtacatttgtacgtttcccgttctttaatacaattgtataaatatcatgcgtaggggtacttttaaccgtataattctttatcccgtttgtggtatctgtgttaatgataaacttatagtcagcatttttttgattattattcgtaaactgaagctgagtaattggcagttttttattaaactctaaagattgccatccagcaataggggaagaagagcctttataatttttgatagtgttcattttcgtgagttgaattaattcaatttgttttttatcaagcttactagtcagagtgaacactctggctgcagatttttttacatctacatcttttccaatattaaatgtatcggtgtatgtatggtttttatttgattccattacatcacgcacaataatactgttggtgctttttaaataaataagcgttctttttacttttactcctttatacagttcatggctgccggtaacgtagctgtacgctttacttatttcagacgtattaattttagatttatttacttgatcttttgttataggaaaagactttttgtctacagttaccgtattatgtgccaaggaactcttaacatattctcggtaagggtctgtatagctgtaattgtactttcctgaatccacaaagaaatttgtttttccatagcttaaaagaaaagataaatcatctgcatgtttatgagtagtagagtgaaaggcagatgtaaataaaagatataaaggtgtttctttgctccaatcatttttaaaaacagcagtgccgccatctgtatatacaatatctttgtcaggtttttttccttgtttgccttttgtaacaacatatagaagtttatcacttgtaagagccttagggcttaaagaataaaggtcataaggttcggaatctcccaaatttggtaactgtccagatggatccccaaggtatgctaaataatcctccattttcgaaataccgcttgtgagtctaggttctttcacattaaattgtttaataaaaccattgatatttttaaataaattaaggacaagcaggtggtaagcaggactatgctctttgtgaaccccgctttttgttacatcctcttctacatgtacaagcaagcgatccataccttttttataccattgctgactgtgagacatgtttggaaatagtaacgctaattcaattaaagagcgatcttgaaagatgccgtggttactgccaaacgaataatttttgtcgtccattaaaaaatcgccgtgcttttctaacatttttaataccttattttcaaaacttttattataaatagaagaacctttatattggtccaaaaattgcgccatattaactactcggtttgctgtactgtgatctctccatgcaaagcggctcgcttgcttttgaggagaagggttggcattcatccaactttctatgtaccactgtgctttttctaagtatttttgagaatgagtctgttcataggcagtcgtcaagtagccgaccatatctaggctttgaaaataaaaagaccaggtgtcatctttataaggattttctttccatgttaacttcccattaaatttataaggagcccagttgctattaacgtaaagctcattgtttagcagtttatttgcaatacctacagtttgagagtttgaactaactcgtttaaacaaattaacctttttaaccgacggtgcagcagatgaacttttagtacttgacgctgcataagcagggcttactgaagctgacatagatacaagtaaagaggcagccacagaatatgtaatcatcgaactcttccaatttcttttcatataattctcctcttagttataagtaatagtgatttatagggttaagtcctcattcttacagtaatctttcttgttcataaaaagttaaaatacaattaatatagtaccttataattagtataaaagtaacttttattttcctttttattcaatttttaaataatgaaagagtaattaatacattgaacagattctaaaatttactcagcaagatacataatttctaacaaaagctaactgtgtttaattgtttagctaataaatagaaaaaattaaatgaaaatgaattcataatgtaaacaacttagtagctctgtcgatatatagtatgaacatatttcctagaggtatatgtttgattactgtcagattctgcttaactatgaattaagcaggaaacttcttgaatacaaggatgtaaccaagaagtaaaaccaattatatggaggtaaaggaaaatgagaattaatcacaatattgcggcgttgaatacgtatcgtcagtttaacaatgcaaatgctgcgcaaggtaaatcaatggagaaactatcttctggtcttcgtattaacagtgcggctgacgatgctgcaggtcttgcgatttctgagaaaatgcgtggacagattcgcggattggatatggcttctaaaaatgctcaagatggggtttctttaattcaaacagccgaaggcgcgttaactgaaacacatgatattttacaaagaatgaaagagttagctacgcaagcagccaatgatacaaatactacagatgaccgtggtgaaattcaaaaagagattaaccaattaacatctgaggttaaccgtattgcaaatactacagagttcaatacaaagaaagtattggatggtggtaaatcatcagcagtaacaagtgggggaacgccagcggcagcaacagcgccaaaattagaaggaagcgacgtctcagcactgcttaattctgacatttcagctacaagtattaccttgaatgggaatgcagtatccctaacaaatgttgatggtctagatggttcaggaacaccggttgcaatggatgattttgtacaagcgttacaaagtgatatcgatgcagtgtatgacggaacgtcaaatggaggagaaacctttaaagttgcaaaaacagaagatggtaaagggtttacaattgagtcttcaaaaagtggctcatctgcttctgtaaacatcacagcaaatgctgattcggctactctaggtttaactaaagatgctacaacaaatgcaacagcaactggtgcagatgctccagcaggtggagctacgggctctttcacagccacccttcaaattggagcgaataagggtcaggcatttcaaattgatattagtgacatgagtgcatctgcactgggaattagtcaagcttctacggcaagtgggggaacaccagcggcagcaacagcgccgaaattagaaggaagcgacgtctcagcactgcttaattctgacatttcagctacaagtattaccttgaatgggaatgcagtatccctaacaaatgttgatggtctagatggttcaggaacaccagttgcaatggatgattttgtacaagcgttacaaagtgatatcgatgcagtgtatgacggaacgtcaaatggaggagaaacctttaaagttgcaaaaacagaagatggtaaagggtttacaattgagtcttcaaaaagtggctcatctgcttctgtaaacattacagcaaatgctgattcggctactctaggtttaactaaagatgctacaacaaatgcaacagcaactggtgcagannnnnnnnnnnnnnnnnnnnnnnnnnnnnnnnnnnnnnnnnnnnnnnnnnnnnnnnnnnnnnnnnnnnnnnnnnnnnnnnnnnnnnnnnnnnnnnnnnnnaagggtttacaattgagtcttcaaaaagtggctcatctgcttctgtaaacattacagcaaatgctgattcggctactctaggtttaactaaagatgctacaacaaatgcaacagcaactggtgcagacgctccagcaggtggaactacgggttctttcacagcacaagctggagtaagtaatggaacagacagcagttcaactgaatctggattagatgtatcaactcatgctaatgcaacaaatgctattgaggtacttgataaagcaattgcaaaagtttctggagaacgttctaaactaggggcatatcaaaatcgcttagatcacactatcaataacttaaatacgtcttctgaaaacctaactgcagcggaatctcgcatccgtgacgtagattatgttttagctgcataagcagttacaagcacagtcgtcctagctggtaacggctagtgattattattgggtgaattgctggaaaccccttagagcttttcttgccacaacgtagttagaaatgacaagcgtgatggcgcgaaaaaagaaaagattgggcaatcagcagccaagctcctgtcttgaaaaagtggagaaggttcaacgactaggatagaccatctaaggcaaatgctatgatgatgaaatccataggtgaaacaataaccatcagtattgtgaatccgaagtgcccgacccctactgtaatatgagggtgaagatatagtctagtcatttatgaaaataaatgttcgcacgatggcgaaagaaatgatggaacaaacaaagaattcaattctttctcaagcatcacaagcaatgttggctcaatctaaccagatgcctcaaggagttctacaactcttgaggtaattgattaaagggcgtctagcttggtaacgagctagagtataactgggtgaattgctgggacttcctaaagctttatcaaccacaacgtaactgcaaacggtaagcgtaacggtttgaaaatgatgaagataacacaatggattatcagcagccaagctcctgtgaggaaactctggagaaggttcaacgactagaggatacggtctaaggtgaaaactaggattatgaatctcgtagggcagtgaaagctgttcgaagtgcccagctccatgcaaaacatggatgaagatatagtctattctgtaatcgaaagatacagtcgcaaagcaagcgaaccaacagccacaaggggttttacaacttcttcgttaattttaaatataaaagaggttctaggttttctagagtctctttttatctatttgagacaagtaaattagttagggcattatattaatttgtagaggaattacgaacatttcaattttaaaacaatctgagtggaggaaccgatgggaaaagatgagctggaacataagaagtttcttgaacaacagcttgaatggtgtaaagaacaagaccgtattttagaagagatagaaatgaagctctacgaaatgaaaaagatagcagagtatgcttttaatcatgaattgactcctcattcaactgatcgattgaataatcaattgaagagtgaagttcattttctagaaaaacagctatcctatattgtccattagaagaagaaatgtggtgttatatgaatatcgcacttatgtcaatgtcattaagccaaggaaaagtccaacagcaagcttctctatcagtcatgaaaatggcaataggaaacaccgaacagcaaggagaagctgttaaggagttaatcaacagttctaatgtaaaagcacttcagcaagccgctcagccgcatttaggtagaaatattgacttgaagttataagtttatcactgctttaagaacaatgaatatagggacagtgaaatggttctcctacgtaaaatgaccttaccacatgaagtaaggtcatcttttatataaagtattataggattttaatgcgtagccccgcccgaaaccacaacatcttcttcaaccaaaatcgtcgtcttcaccacactaagcaacccctgcacaatcaaatccaaagacatactcgctttcccgggatgattcacagcttgttcaggaaggtaagggatatgaacaaatccgcctttaatacaacagttttgaatcatgttcatgagcccgtaaaacacgtggttacagacaaacgttccagcggtttgagagacgctgcttggaatgcctgctttgcgcagattttcgacagctgctttgatgggcagtgtcgaaaagtatgcggcggggccattttcgataatagggcggtcaatcggctgctggccgatgttgtcagggattcgcgcgtcgtctacgttaatggcaacgcgttcgaccgtaattccttctcggccgcctgcttgtccaacgcaaatgacgatagaagggctaatttcttctatatacgtatgaagctttgcgattgattcgccaaacacagtaggaagaggcttagcaataatgtgatagtcttcaacagctacgccgtctaaagcttttaccacttctaacgacggattaatactttcaccttcaaatggttcaaagccagttagtaatacagttgtcattctactagtctcctttaaaagtgatatacaaggtaatacattaataatgtgttaacaacaaacacggataaagcaatcggtacttgcgctttaatcacggcgtttttgtcttttaattcaagcagcatagcaggtacgatgttaaagttggctgccattggcgtaagaagtgttccgcagtagccagcaaacatgccgagcgctgccataatcgctggattacctccgtgcatatgtacaatcagcggaagtccaatacctccagtaataacggcaaacgcagcaaaggcatttcccattacaatcgtaaatagcagcatccccaaacagtaagcaagcacagccacaaacgcatagttagtcggcagtatatcacttacaatatctgatacgactgttccaacgcctgattttgaaaagatgccgccaagcgctgcgagcatttgcggtaaaataactgcccagccaactgcttgaagcaagcggcttccttctttaacaggtacgtccatttttgctttggtgacgcccattgaagcgataaacgcaatgacagctgcgattgctagtgaaattaacgtgactttttctggatcaattaatgcccagtttccaaatttaattttgccaaaaagaagggtgccgataatcgtaaaaataggaataaataaagcaggtaaaaagattttgttttttaatcgctgcgcgtgagccacacgttcttcagccggtgtttcggcttcattggacttagtcacacgattgaatgaagcaagcagcaccatgataataactaaacatcctatataaaaaggcggaatcacgttgccgaataaaaacgtaacggaaaacagcgcccagaataatgaagatcctaaacggttcggatggttgtgatcgcgtgcgattcgaatcgcaataaaagcgacaataatgccgagtaagtagtaaatcgtatcaagcgtcaggatgcttttcatttaactcgcctccgtcttagaagatgatgttggtttgtgcttcgtcatttttttgtggattcttcggtctaactgacggaagcgaatggcgctgatcagcagcgctgcgatggccgttggaataccccaaagcgccatatcccagacgtcaacgtgaatgcctacggagtcaaagaatcctttcattaaaagaattccacccgttgcgataaagatatcttctccaaaaaaccagcccgtattttcagctgcggctgcgtgggcgcgtatatcttctttaactttaggaggaagctctccgtacttggcgcgagctgcgccttcagacataggtgccactaacggacgcacggattgagcatgccctccgatatttaagccgacagcggctgagatttcacggataaaaagatatataagtaaaacatttccagaagaagcgtttttggcttttttaattaatacttccgcttgttcctttaacccgtatttttctaatacgccgaagataggaagagtaagtaaaatagccatagacatatagcggttatctacaaaaaactggccgaacatcgtaatcacttcatggagcgataagcctgatacaaggcctgtcacgatgcctgcgacagtcaccacaagcagtgtatttagacgaaataaaaatcctactgccactagcaaaaccccaattaatttcaacataaaaaaatcccccttcagtatgtatagaccgtgctgtaaattcacctccattgcttttctaaaaaaacaaagacgtattgagtataaacaattctgaaaattaaaacaagatagttaaggtacaaaatagtttggttattgaaataaaatatggaaactttcaattgattaggaaaaagctcaataaaattattattattttatcgtaagtctttttatttatgagtttagccattgaatggtggtactaaagtttatgaaaaatttaaaacataagtataatgacagctttataaatagtataatagttctaattannnnnnnnnnnnnnnnnnnnnnnnnnnnnnnnnnnnnnnnnnnnnnnnnnnnnnnnnnnnnnnnnnnnnnnnnnnnnnnnnnnnnnnnnnnnnnnnnnnnggtacaatgttaaagaatattttaagtttaattgtattatgcttagctgtaatactaatgcctcttagtgggagtgcagtctcacaacaggataatgtcaattatggaaagacttcatcagaccgtcatttattgttaagtgatttggtatatgaaaatttagatgaatgtaaaaatataaatatcaattattgttcgcggaaagtgatagcaaattataaattagaaataaatagcttaaaggactttaaaaaaagagatgaaaaaataaaaaagttaaatgaatttaatcaccttattaaacctagattagataaaaatgtaggagaatggaaagtaatagctattcaagggaaaaacacaggtggattctatggtgcagcttttaaagatcctattacagatgacatcgtaattgcatttagaggaacgcaagaaaagttatcagatatttcttacgatgctttggcggtttttctaaactatactgaaatatctcaattaaaaccagcgtgcaaactcatagaggaaatcgttaataaaaacaaaaattctaaattttatttgacaggacattctttaggtggctttttagcacagagggctactgtagaaattcaaggtaatccggatctagtaggttatccagatattattgatgttggctatacggccaattttcctgaaaaactaaataataattttgagtatgcagagacttttaacgctcctggtgttcaactttttatacaatctagtgaattagattctgcaaagagagaaagtgaacagaaactattaaagttaaaagaatataattttagagttattgatcacgtttttaaagaagataaaattgggaactttggtgttcaattgggacaacagcaattttatcactataaaggaagtgaaagaggatggcttagagctcattggctttctttattttataaagagcgtttacgatcaatccctttaaaaatatgggataaagaaccaccgggtaagcccaaagtaaatcctatttctgatcaaacaatatctataacgggtacaacggaagcaaattcaacggttacaacaaaagttggaaaaaaagagattggtagcggaatagctgataaatacggaaagtttaagtttaaaattcccaagcagaagctaggaataaaaatatctgtaagagcaaaagatcgtgcgggaaatgtgagcaaagaaagtgtagtaactgtcaaggatactactccaccaagtaaaccaaaagtaaataaaatctcagaccaaacaatgttcataacaggcacagcagaagtgaacgctaatgttacggcaaaagttggaaaaaaggagattggtagcggagtagctgacaaaaatgagcagtttaaaattaaaattgctaagcaaaaggcaggaaccaagattagtcttacagcaaaggatcaatatggaaacgagagtggtcgaatggaaatcactgttagtaaaacttcatcagttaacataacaggtgaaaaaatctctttgaaagaagctgagaagcgagggcgctttactacttcttttaaagatacagaagataaccaatacaaaatatatgtaatagccatccaagacataaagtggatcgcaagctacgatgatgtttgggcagcagttagtgaaggagatgaaatttacgaaggtaattatcaaattggcattcaacctaagggaagtacttttgtttatctccaagaaactaaaatttcaaattatcagtacaacaagacgcgaaacatgatttttactattggttctggatcgaaaaatcaaccagattttttggttttttcaacacgagaagctagtgtttcagagggaggacccgtttattacatgaaaggtggaaagttaaataaagctaagttcatgcagggaaatgaagtgtcccaagaactaaatttttcagtacgtcctaaatcaataggaaataacaatattcaacttgttgattattggaacggaggccctattggctgggagtttagtacacaccactttaatataaacaatggtactttcacctatgtaggttctaaattttatttagatgataattgggatgaaggaaaacaattagttgagaagtggaaggcaaacccctcattctttgttgaaactcctgaatcaagaaaagatgtattaggtttttagtttgtattagataaagcagtgcatattcaatagtcttcagcgtctattgagtacagtgttcagttttattcagtatcttctaacctttattaaattttggctatacatgatgttccatattttttctggaagtatctacaagcagctgcagatactttttgcctgccacacgcttcaaatttcaaaagccatacagaaatatcttactacaggtagtgaaagaaggaaaaatgtctgagggacaaattgaaagcccagtaaaataaaattactaactcataggctaagtgtgatttacgactgcatgtgaattcagaaagagtaaacaaatactaaaaaacacacaataaacaggcggtgacagaacctagtaaatgaagaaagtctccgttgaatagattgttgtttcacgggggactttcttctttcactatacaaactatagcttttcttggaggcatttatgattaaaaaagcaatagttgtagctacagttgttctattactagcagcatgcaccaccaaagaaacagggaataacgattatcaaaaaacattgaaaaaggtctcgatgccgtagctgaaaatgattttgcaaaggcagaagcatagtttgaattatcagtagaggacaatcgagcgacaaaacgacgaaggcctatttagagcaattctcactcattcgacaggcaaatgaagatatagaaaataatagagtagaagaagggcttgaagcgttgaaaaagactgagaaatataaaactggatctaaagtgattaacgcaaaagctgaagagcagataagatcaatgacttcttcaaagaaaacagaagaaacctacaaacaactattaaaagaagcggaagcattagcgaaaaaggcgaactaaaaggcttctaacgacaagcttacaacattattaaatgaatattcagataattatagtgatattcagcaagcgggagaagcgttgaaggaaaccaatacagctgaaataggaaaaaaggtaaagaaagaacagacggcaactggtaaagaggagcattctactgtaactcagtccacagaaaaaatatatgacctctacgagtgggctcctggcctaaaagaagcatttgaagcagacatggtgaatggacaacaatacgtagattcagtagatacgattagatatgaaaagctttaaggggataacaaccaagggttttatacggtatacgaacaaatagatggtgttggaatgcatattgtcaatgtcaatgtaaaaacaggagattatcacggttgaataaggcatacccagtttcagcgtgtaaaagatagctagtatataagaaaagctgtgcagaggcgcctccgtacagctttttaaatattaattactaagagaaatgtgttcgttttccatacatttacagtgcgcgtgatgcatgtttagaatatcttcatacagcaaaccgagaagggtttgtttggtgttagggtcttggtagatagatatcatggtagcgatttcgcttacgacagcaagttctttattatttcgcgataacggcagctgtatgcttcggcatgagaaaaaaaggtagcctgagtaacggagtaaaacctttgtttatgcaattttttatagatatggaccgcattatttatgacttcatcgatccgtttaaatacatgctgttttatcccttatagcaatgagtatagatgaatataaattgttttcatatgtaagcgtcagatgctaatttttcggcttctaaaatgagtttgatatagtctaaacaaataaacgatttatatgatattcgagggaaagaagagttaaaaaagatgtttggagactggatatactgaccaaagaagccatcgattatgatggcttctttggtgatagtaaggggaataaaagcccaaagtaaaaaagtataactatgcatgaagcgaattattgaagggacacgggatatttgaagcgttcaaatcgtatctatttcaataatggcgaattatcggactaagtaagattaaaaatccagtctaaaatcccccgactttttaaccgctagtatttctactcaatactgcttctagaataggtttttaaatgaaaatatactacaaatacgcattccaagggaaatgaaaagaaaaaattcaagaagtgtatttacttaaaaatattttttgtataaaataaaatagttaatttttcatatttttcatgagagtggaataaagttagttttgaacgactaggtcttatagcttgttaaactgttataaatttgtatatttaggttttgaagagaatttatatttgtttcattgcaaaagattgggatgtatgttcactaaaatattagtgatgtatataaagaaattaaaaggaggaagcaaatgaattatgtgaatggtttggctttagcagatggtgaaagggttgtcaggaagtacgaagcttctgtattaaaaaagcccaagtcgaacggctatttaattgcaacaaatcgacgccttattttttcaggagaagcaagcggtgtttcaggaagaagtttacttgtaagagaggtgaaaattgatcaagtctcaggaatcgattctttttatggacgaggctggagtataggaaaactcgtattggcgattattttaattgttgtatttattttgctttctcaaatggcgaattctatgtatctatcaggactcagtacatttctattgtttggtttattatggcctgcttttttaatttataaaatgattacgaatccagggaatcaaatggctcttcagattattgccagtaatcagtctccaagtgcgattggagtgtcggttgaacaaggaacgggtatattagggtctctttttagttcgttaggtttaggtggaaatcacgcttggatggctgtcgctgcagcaggaccaggcagacatactgaaacaatggttcgcgaactaggtgcattgattcaagatattcaagtaatgggagaccacgcgattgaaaaatggaatgaagtagaattaaaggggaaacgaagtgagcaagtgtcacagggagaaatcgttcgatctcaacttgcgaccactgttgataaaacgcgaagcaaaattcaagaaaaagtgagtgcgccttccgcagcctcatattgtcaatgtggccatcctgttgaaagtaacgatttgttctgtggaaactgcggttctaaagtaacaaaagataatgatgaagagatttttggataatgacatatcttcataatgaactgatggaagggcaacaattgttgcctctttcttcaggcacggttattgataagggaaaagccaaaattggtataagaggtcaacatcatacgggtattacactgcatgcggatttgttagctaggcatattttgaccattggagcaattgggagtgggaaaacaaatacaatgaatcatatcgttggagctgtcaggaaaacgatgagtgaaaatgatgtaatggttgtatttgatgccaaaggtgattacctaaaagagttttaccgaacaggtgatattgttatttcaaatgatagtgtcttacacgaaggagggggaaattggaatatctatagagatattttggtgacacctaaggaaaaacgtgaagaaacaattcgtgaaatagcttcatctttattcaaagaagatattgaaaaatcacaggcgccagtgtttggaatgggagctcgagacatttttgctgctattttatccattcatgttcagcaaatggaagaaggaataaaaagttgggatcacgagcagctgttagagtttatgagatcaacaactgaaacagatttgcgcaatatgttcttaaaatcccctgagttcaaatgggttagaaattacataaaaaaagacgggggttcaacaactcaaagcttcatcgtgcatctttatcaaactatttataaaatctttagcggttcgtttgctaaagctggtaatttctccattagagaagctgttacaaataaagagggaaaagctatatttttagaatacgatttagctaacggtaacatattagaacctatatacacggtactattagatttagcgatgaaagaagtcttgggaagaactagaacagaaggaaatgtctattttgtattagatgagtttccattaattccaaaattaaattatatggataatgcattgaactttggaagatcacttggcgtaaaagtaatagccggaattcaaaatgttggacaggtagaaaacaaatatggccattaccttgcacacagtatcttaagtggatttggaactatctttacttttagactttttgattccaacagccgttccttttttgctcaaagacatggaaatgtgaaaaggaaagtaagttttttatcatctaattcaaataaaggcgtacaagatcaaattgtcgacggaaacgtaatagaagattgggatattgtaaatctaggtattggggaatgtgtagtttctcttccgcaaggtgagccattcttattttatcctattttatatcaatctgatatttaactaagaacaatgtatattgttctttttttttagaaaattattatggggtgatcgagtggggattttaactatatttcaaaaacgtaaaaaggaaattgaatcgtttattattgcaactggaagagatttaggatgctttagattgaacgagaaaagagaggcgatttttgcggtagggtccttgtttgatttagtgcagatgactaaaaaggaatacaaaggatggaaagagctaaaagcgtcaagaaccataaataattgggcggaaaactgtattaataataatgtagtaaatgacgcaaaagagtttgaacaaataaaattaaaatttaaaaaccaccgtttatttgaagagtgggatgcaaattcaatattacaaatgaaagaacataatgtctcaaaaaatggtgtttttttaaactattcttctaaagaagataagtggattatttcgagtttctttccaaaaagaagtatttcattaaatcaagaacaatatgaggtctggagagctgctgtaggtacttctacgattgctgatgttgtaaaaatcgttgcaaatacttcaaacaatgacgaaaaaaaggctattgaaaaagtgataagaattgctcctatacttgttgaacgagatttatggaatattgaattctttgggaaagcggaaaagtattatgcgaatgaaaaagttatagcagatactattcataccgagttttttgattccaattcactatctgccaacacaaacattgtgagcctaggcgatgaaataggatatgaatcaacaagcataagagaaaaagataacatgttaatcatggtagctaataaagtagtgactttaaattctaaagagcatgcagcttgggtagcgtttaaaaaaggagtattaactatccaagatagtaaagaacttttttctgttgaattagaagaaataataagcgtggttaaaatgctgatggataaaagagtagtaatgaagtggccggaatctctaggagttaataaacaatttgtcttatcagtaagtcctaaagggataggaattggaaccaaaaataataaggaatacaaaatattagatgtcacaaatggagaaagtaaattccttccatatgaagcttatatggtttgggcattttctcatgggtatgttccaattgccatcattattgaaaaattcaaaatgaaccttaattatagtcaagaagatgcaagctatagagttactcaatgggttcgcttattactaaaccagggtgttgtgaatcttactattattcctgataaaccgctagtagttggctggaaaaatcaacgatgagatggaatcctttctctaggtataagcgagtatatgatctttataaaagtggcgaactaaaaaatgccattgtgagaggaatcaaagaagatgcctatgatcctgattttagagccatattagacaccgcacagtttacatctaaagcaatacaaaggagtttactacacaccgtgcctgtaagcattcctacttctgctatacaagcggctattacatatgcacaaagagaagtaaaggagcacggctccgtatttaatgcactaaaacacaacgcggcagcttttggagcaaaatttggtgaatttcttaaggatgaatcttctggagtaattactccagaaattcctaacttcaattttaaaaacgcagatttagtatttaagtcaatagggggatttttaggagataaattaaaggatggagtggtagggtttgtaggtgaagctgtgcagggatgggcagataagattatggaaaaactacaatctgatagtttagaaaaccttagctgtggagatcacattgatgaacagttaagcgatagttttgttgctgataagactaatataggagataatgagaatctttttaatggttggatggaaaacaataatcatgagggggcaataggagaaactgtgtcaccagaggatgtggggatgccagaagaagctgtagagtcagaaaatctaggtttgccggaagaagctgtagagccagaggatggaagtacgcccgaagaggaagaagcgccagaagatccaggtataccggaagaagaagaagcgccagaggatccaggtgtaccggaagaagaagtgccagaggatccaggtataccggaggaagaagtgccagaagatccaggtataccggaagaggaagaagcgccagaagatccaggtataccggaggaagaagaagcgccagaagatccaggtataccggaggaagaagaagcgccagaagatccaggtataccggaggaagaagtgccagaagatccaggtataccggaggaagaagaagcgccagaagatccaggtataccggaggaagaagcgccagaagatccaggtataccggaagaggaagaagcgccagaagatccaggtataccggaagaggaagaagcaccagaggatccaggtataccggaagaggaagaagcgccagaggatccaggcataccggaggaagaagcgcgagaagatccaggtataccggaagaggaagaagcgccagaggatccaggtataccggaagaagaagtgccagaggatccaggtataccggaagaagaagcgccagaagatccaggtataccggaagaggaagaagcgccagaggattcagatgaactagatggggaagctaagcccggggagttgccagagccggaaaaagaatctgaagaaaaaggtccaatcgcaatcggggtggagaatgctttcgatgctgctgaagcacacaaggcgtggggagaagctgagaaaaataaaccattaaacgatgatgaagaaaatgaaagcggagattctagtggatacccttttaatggggaagaggccgcagagaatgcagaggaaagccccgaggaagagccggcagagaatgcagaggaaagccctgaggaagaggctgcagaaaatccagaggaagcaccagaggaagagccggcagagaatgcagaggaaacacccgaggaagagtcggcagaaaatccagaggaagcacaagaagaagaggctgcagaaaatccggaggaaagccccgaggaagaagcgacagagaatcgagaggaagcaccagaggaaagccaagagaaagagtcgacagagaacccagaggaggatccagtagaaaatccagaggaaagcccagaagaagaaatggaagaagtgccagaagaagaaatggaagaagagccagaagaagaaatggaagaagagccagaagaggaaatggaagaagagccagaagaagaaatggaagaagagccaggagaagaaatggaagaagagccaggagaagaaataaaatttaatgataatgaaagtctataaggtgaagaatataattatagaaatatatattttaaggtttgaataataattatttaaaggaatgataataaaatgaaatattgtaaaaattgcggtgaaaaattaaatgataatcagcagttttgtgttaaatgtggttataaatttaatcaagaagataaacctgttgtttccgaacgcagcaaaagtaacgttaaagagcatacgaaagagagtagaacgtctaaaaagttgagtaaaaaaacaaaggtgattacaatctcagctatagcagcagcagctatattgggcggcacttactacggaatcgataaaacgatgatggcacctaaagcagtgtcagaaggatttatttctgcggtaaagagcaatgacgttgataaagcaaaaaaatatgtaaatgatggccagattcaactagaagcaaatgatgaacaaacaaaagcatttattacatatttacatgaaaatccggatgtaatgaagtcaatctcggaaggattaacggcagatagtaaagatcttgaattagatgtcccaagtgaaggccactcttcatacgctaagctagaacaagatggaaagaaatggggaatctttgatcattacaccgtagaagtaaattctgtatatgccaaagttcagtctacagaagatgcgacagcggtttacattgatgaccaaaaagcagggacaattaatagtaattctactaagaagataggaccgttcttgccaggcactcatactattaaaggtgaaattaaaaacgaatatggtaaagttgaaaatgaacaaacggttgaaggaacagacgatacagaattgaatgtaggttttgattggtcggaccatgctgtacatctttcctctgactatagtgatgcgagactgtttgtgaatggaaaagatactaatacagaaattggaaatgttgattatctaggcccgctgcctctggatggttcggtgaaaatatatgccgaacgtcattttgattctgggaagaagaagacagaagaggtttcaatcagaaaaggaatgaaagacattgcgctcaactttgatagggaaagtacggcagaagcgtcaactgctaccaaagaagaagagccggctgccaaagattcaaaagccgattctagttctagagtatctacaagtcaagtttctaattttattgaacagtatatgtatgctacaatttcttcgattaacagtgaagacttctccattgcagagccttttattgattcaaatgggccaaaatacaaggagcaaaaggagtatacagcgtatctaatcaacaaaggcattacagaagatttgttgagctttaaagtaaataaagtaacaaaaatggatggccctatgtataaagtgtatacaacagaagagtatgagatttcatacggagatggatctgttaaatacaaaaaatttaacagtattcataaagtaaaagagtcagctgatggaaatttaggagtttatcagcttgttagctcaactgaagtaaagtaaacatgagtcattaggctgtgacagtaggaaaaggatagtagaaaaaagaggctgagacatcatcgaccttgtaatatctaaaaaaatggttctaagtcgaccttacgtttttcataataagccggaaaaggtgatatcattttctttcgatttggattttgtctagtaacttaatgccctcaggggttgtccttattttggagaaaagacaaatgaatagagtagaatagacgaaaagaggcccaaggaacaacgagtagtttcccggggcctcttctaattatatatgtggttttgtcccagccacttttatactccatacaaaaaaatgcaaacgagtagtgtaaaaaatatgccacaaaaattttttcctgcaaggtaaaaagatctctattagaaactacatgtaaaaatcaaagactagtgaaaatactagtgtacaaaccgatattaataataaggaaaaacaggatcactaattggtaaataaactagcttcacaatacaaaatatagcttttcttgggggacatttatgattaaaaaagtaataattggaacgactgtcgcattgttactagcagcatgcagcagtaaagagacaggaaataacaatcatcaaaaaagcattgaaaaaggtcttgatgccgtagctgaaaatgattttgcaaaggcagaagcactctttgaactatcagtagaggacaatccgaatgatcaaacgacgaaagcttatttaaaacaagtgttgcttattcgacaagccaatgaagatgtaggaaatgataaagtagaagaacggattgaagtgttaaaaaaggctgagaagtatgaaaaaggatctaaagtgattagtacaaaagcggaagaacaaataaaatcactgactgtttcaaagaaaacagaagaaacgtatagacaattatttgacgaagcagaagcattagcgaaaaaggctaactacaaggattctaacgataagcttacaacattattaaatgaagacttggataactatagtgatattcagcaagttgcagaagcgttgaagaaaattaattcagctgaaatagaaaaaaaggcaaaggcagaacagaagttagctggtaaagacgagcattctactgtaactcagcccacagaaaaagcgtatgatccctacgaatgggctcctggtgtgaaagaagcatttgaagctgatttggtgaaacaacaatatgcagattcagtagatacaattagatatgaaaaatctcaagtgtataataaccaagggttttatacggtatatgcacaaatggatggtgttgaaatgtatgttgttacggtcaatgtaaaaacaggggattatcacggttaaataagacttatcggttcatcctataaaagatagcctgtttataaaaaaagacgtctgccaagcggagacgtctttttttatatgacacagaatatcaaacccagtacctgggatactgccgatcttgaaataaattgttatacgcagtagaaatcaatacaactacacatgcacaaatcataataatacctaaatatccccagccagcttgagtattaattgcgacaatcgcgctagctgcagcgggaggatgaacggtttttgtaagaatcattaaaataagaacaaaagcaagcacaatcgctatggtgattagacttcgatgaaataaactccaaataataagtgcggaaaccgttgcaagcaagtgccctccaagcacgtggcgcggttgtgataaaggacctttgtgagctccgaagacaagcacgcagcttgcgccaatcggagcaagagccattggataaccaagcgctagtgcaatcgcgctgctgatgataatcgcaattaagcctccgatcgaagaaacgactgcgtctctataattgattttcggttcttcttttagttctcctttcatctttttagcataagagcttaagtaagacagaaaggggctttttgtttgagcaaaacttttttcaatttgcatttcttctttcctttctcttttgtaagtaaaagttgtttgtcaagttgtatgtcagaacatctgctatattaagttagtttataagaaaacaaggattactggaagaggaaaaatgtctttttttagtggaaatactttttatgaacaaaaaaaggtgggataagcggtagaagtgtctctatgtgcagtaagagtaagagagatgtataataaacctagaggtgactaaattatgtatctagtagactaccatcatcacacaaacaattcatttgactcacaggcagtcatgaaagaagtgtgcgagcaggctgtaaaaaacggcataaacgaaatttgttttaccgaacacttttcattaaatccattagcgccaacgtacggtcatatggattttgataaatatgaacgagaactagcggaatgcagagatcagtttcaaaatcagctagtgattaaaaaaggaattgaaatttgtgaaccgcactatctaaaagagaagtatcaaaaaacgatgaagcaagagaactttgattttatattagggtcggtgcataacattaataacatcaagcttcgtaaacatttggagctgaatgacaaagaagcgatttaccgcgcttattttaacgaaatgtataagctagtaagcgaagcggatattgatgtcttggctcatttagatttaatgaagcgttatgcgtttgaacaatacggcatttacgactttcatcaattcaaagatattcttggggaaatcttaaaaaaagcaattgagcgtaatatcggaattgaaattaacacttcaggtatgagagggaagctgggcgaagcgctgccggcactggaagttgttggactgtaccgtgatttaggcggagaaatcttaacgattggctctgattcacacttcgccgaaacggtaggagcacatatgaaagaagcggttgaaatggcaaaacagtgcgggtttactgagatttatacgtttgaccaacgtgagccaaaaggaattggtatttaataggagtgtgtttcactttcttttagaagaatagtattaactgtaaaaagcacgctctaatctgagcgtgctttttacagttagttccgcttaagctccgataaaaatttccggacttcttcgatggtcagacccagcttgcgggctgattccataagacttacccgctcttgatcgattgacagtacatgttcttttttcattacgattcatccaccctttgccagggaacccagctatcgtagccgaaagcggccttagacctgaagctttgcgtcactatttttcaatagtttttcccttatctggataatttgtaatagtattcttagtatacagttattttacaaaataatatttgtaaaagatgtcgaaataggtcgattgcaacaaaaaaattaaacgttcgtgaatggacctatcagtttgttttacggaactttaaataatactgaaattcaataaattcttctttggtcatgccgtcttgaatggctcgttcaattaaatgaagccactctagattgagggctggctttgaagttagagctggacagctgatatctccctcaattaattcatcaatcgttgtgtgaagagaagacgcgattttatcaagcatttgaagagaagggttattatttaaccctttttctaaatgagacaaatacgattttgaaatattggcttcttcagccaagcgtgtaatagaatagcctttttttagtcgcaaattcttaatcttttctcctatcacattcagttcatcctcttcttataggttttttgttcattataacgcatatttgtgcattgtgtgtacataaaaatataaaataaataatattttgttctttataaagaataaaataggtcaaaatatctattcttgatgcgggtatattatgctatacttcacttacaaattgttctttattaagaatatttgtcgatttatcacttttttattcgctataatgaacgttttgtatagtacgctagcgctatatgaaatgatccttgcgcgataaagagataacattatttattacattaggataggagattacatgaaaaaaagatatgtagaacttgattctttaagaggattagcagctctttttgttgtgataaatcattatctcatgatttatccaagcttcagtgagtataggtatgacggtgattcttcttttttactgtccatggtaaaagaaagcccgctgcggctattgttcagcagtggaaatgaatcagttgttttgttttttgtcttaagcggatttgttttagcacttcctttttatggacgttcttctttccgatacgagaactatcttgtaagaagaatttgccgaatttatcttccttacttgtttgcggtgtgtgtggctattctatgcaaaatcttatttagtcaaggcggggtctcacagttaagccactggtttaataactcatggattacaaacgaatcaccaagtttacttcttcagcacttctttttaattggcacatttaacacagacgcttacaacaatgttatttggtcgcttgttcatgaaatgagaatttcaattatttttcctcttttaatgattcttttgctgcgaatggacgcaaagaaaatcgtgatgctattgtttttcgtgtttgtttcatcatcagcgctattactgcttaatcaatcaaacttagaacctacgaactacttgctttcttatcattatttgcttttattcgccgcgggtgcggtcacagcgaaatatcgagattttttcattcgactttatctgaaaattagcacatttaaaaagagtcttgtcgttctgattgcatttacttgttatttatctgaaggcatcatgggtaattacgccatcaccaataactttttatgccgcaatctggcagtgatggtagggagctgcatgtttattactatcgctttagcatccccggcagcttcaaagattttacgcgcgaaagtactgtcgtttctaggtaaagtttcgtacagcttatatttaactcatctcattgtgctgttttcagctatgtacttgttacacgggtttttgccgtactggagtattttaagcatttgtttccttttatcactagcgatggcttctatcacgtattattttgttgaaaagccttcaagtagattaggaaaattcctgacaagaaacaaagttgtttttggcagagcagtgagtcgtaagtagcagagagagaaagtgtatggaggtgagtttacgatgcaggataaaattcagctaaaggatttttttcgaattttaaaaagaagatggcttacgatgcttttagtcatagtaatagcgagtatgagcatcacaactatctgtttctatctactaaagcctacgtatcaagcatctactcaagtgcttgttaatcaagcaacatctaagaatgtagatgaaatcgctaatattacgcagctgaatacccaattaatttcttcgtatattgattttattaaaagtccgatgatcattaatggtgtaaaagacgaattaaagttaactatttctaacaaaaagctgagtgaacaaattacgattgatcataacgaaaattctcaatttgtcacgattactgtaagaaacgagaattcgaaaacggtaagtgaaatcgcaaacaaagtagctcttctttcaaaagatcaagcgatgaagttaatgaaaggaagcaacattcaagtattaaccgagccgtcgcagagtcttaaagtattcccaaaaccgctgccggttgcagctattactatcttggtcagtctgttggtaggaatagcgggagcaatgctaagagaatatcttgatagcacagttcgaaatgaacaagatattcaagaacttatcggacttccgattattggacatatcgagctggagcctcgaaaaatgaagagaaaccaaaagcaaggcagtgatcagccaaagacaaggagggagaaccttgagttttaaacaaaaaaagtatccattttcactgtatcaagatgccaaaacgatcaaccaaacaaatatgattcgaaaaaatgttgaggtgctgctgaatagtgaagtcaaatgcctgacaatcacatcagcggaagtgaacgataaaaagccgcttatgacggcaaagctagggatttcatttgctgaacaagggaaaaacgttcttcttattgatggaaacgtacattgtccttctcttcatcagctctttgaccttggaagttcagaagggttaacggatgtgttagtaaacgggaaaggccggcatgtacccattaaacaaacatcatacaaaggactggatgtgcttccggccggatctcactttcgaaacgcatccacactatttgtttccaagtattttgatgagctcatagaaaaatggaaagaagaatatgatctgattctttttgaaacgcctcagtttttagaagagaccgattctcatattcttacagcaaaatgtgatgctaccatgcttgttgtggaagagcgtaaaacgaaactagataccgttgtcaaaacgaaaaatatgctgggaaaagcgcgtattgatgtgctaggcgttatttggagtccgtctcactagctcctcactttatatagaaggaagtgaaacgatgaatcaaattgtctcgaaaacgaacggtgattccgatgtgctaaaaaaagaatttccgcttttttactcgctgtgtaaacgcatggctgatattgtgatttcgcttgtggctctagtggtattgctgcctgttattttgctgtttgcgcttattgtgatgattgaaacaccgggttcacctttctttcttcaagagcgtctaggtcaaagtggcagagcatttaccatcatgaagctgcgttcaatgtacagtgacgcggaaaaaaacggagcgcagtgggcggttaaaaatgacagccgggtcaccagggtaggaaagctgattcgccaaacgcgaattgatgaattgcctcagctgtggaatgtgttaaaaggggatatgtcgattgtcggaccaagacctgaaagagccgtatttatagaagagtttcaaaaaacacttccttcctttagtcagcggcttgccgttaagccgggcctgacaggctgggcacaaattaacggaggatatgagctaacgccagcagaaaagctggagcttgatctttactacattcaacatacgaatatacggtttgacgtgaagattatgataaaaacgctaagagtcatcgtaacaggagacggatcaagataggagagggataacatgaaaagagtattagttacaggcggatgcggttttattggatcacatatggcagagcttctttatcaaaaaggatttgaagtgaaggtcattgacaatctctcaacggggaaaatagcaaacttagaaaatcgaggcatttcttttcactacggagatattgtaagtgaagaattagataaagtatttgccgagtttaaacctcattatgttgttcaccaagcggctcaagtaagcgtggctcattccgttactaattttcatcatgatgccaacgtcaatattcaaggaacgattaacattattaatgcatgcaaaaagcatggagctgaaaaaatcatttttgcttcatcagcggccgtgtacggaaatacgaacatcactccaattgcacttactcatccaacgagtccagcttcaccgtacggactgtcaaagtttacatctgaagaatatttgaagcttgccaagcagctatatgatattgactacgtcattcttcgctacagcaatgtgtacggcccacggcaaaattcacagggtgaaggcggcgtaatctcaatcttttttgaccggttcgttacgaaccaacagccgattatttacggcagcggccgtcaaacaagagattttatttacgtagaagacgtgagccaggcgtgcttaagtgccattcagtatgaaggttgcggcacgtttaatatttccaataacagcagcatcagtattaacgaactttttttcacaatgaaaagcatatccggcagtcacttaacacctgcttatcacagcgtgcgtgaaggtgatattgcagacagcagactgtgcaataaagaaaacatcaaattattgaagtggtcgcctgcttttacgcttaaaaaaggattagccaaaacgtatgactattatcatgaaacgctagctcagcaatttgctaaaacgatggagtaagagggatgtatgaagaaaaattccatttggaaaaacattgttcacttatttattagtacggttgtatcacgtttgttaaatgcagctgcgcttatcgtgctggcacagtatttaagcgcagccagttacggcaggttcagcgtagcgctagcttttgcgatgatattaggttactttacagacgttggcttaagcaacacggtgcttcgcgaaggatctaaaaagcgagctgacgtggatcatcttttatcctcgtatgtgaaaatgagaattttacttttacttgtgacatttgcaggggcgtatatagtgatttccttgttttatcacgaagcatcacttgtaaagatgatgtactacttaattgtaccgatgataacaggacttgcgatgcaaagcatcgggattacgtattttcagcttactgaacaaatgcatcatttaggagcgattcggatctattcagctcttttgctggtggttctgctgacggttggaatgctgatgcatacaagcgcgttttttatttcgtttttgtttggcttttcctatcttttagcaggagtgtacggactgtggatggttggaaaaagagtatcgtttaatttgaaaaagaaaattcaacgcggactgctaaaaaatatcggctcatttattgtaagcggactgctgattatgctgctgccgcagcttggtccaattgtattagaaaatacaattccacttgcagccgtcggcgtgtttgctgttgcgtaccgcattccatcggcgctgtatcaagttccgggaattgtggcaggtgctttttatccagtattatttcgtcactataatcatcagcaggcagacaaacatttaaagttaaacattcttcaagtgaagcttatgagtttagtagggatggtaacggcccttcctttttatcatttatctgatcttgccgtgtcgttattgtttggagacaaatgggctgcagcaggagatgcgttaaagtggctgtcgctgatgctgattttccaaggcttaagcgtagcattagcagacggcttaacaacaaaaggacttcaaggaagaagaacgggggttcagctggttgctgttgtatcgggaattgctttttactattttttaagctctgcttattctgtgataggagccgtgtatgctgcgcttttaattgaagggattttatttatcggctgctggttatgtaatcctgaaagagtcatcatcatgcgtaaaacttttcccatttttgtttgtttatttggcagtacgcttgtgcttaccacattactattttcaccgcatccatttatcggactgtgtgtaaacatgctgcttgtattactgctgacgctgctagatcaagagattagaagtcaagcgctaggctacctgcaaaaaaacaaatcagtaaacgtagagaacagaaaggaggcacaaaatggatagtgtatacgtgcagaatcgaaaaccgaccgttttgttttgcctttttgttcttgtaacactaagtaaatataacgtcaatattggcttttcattaaagccgtacatgatttttttatttgcacttctgctgctgagctttgcctctttttacgtctacaagctccaagcgtatgaagtgctgctgcttttattttatcttttttactgtatgaccggagcgttttctctgtacccagaagcgagtcttcgtattatgctaggcgttttgcttatccttgcttgctactttttaatgaaatatgtcgtagcagagtttcatagcggcagcatcaaacgtgcgttaaccggagccggcattctttttaacggcgtgagtttgctgctttatattgcgggtcttcaagcggttcattttcaatttgcctccgatgtagaaatcattaaatggggtgtaatgattgaccgcagctatccccgtttgattggcgtactggatgatcctaatatttatgtattttataataccttgttttttacttactttttaaccaatagcgatagtactaaaaataaagtcgggcttttacttagcacattaacaagcgttttaacgttctcgcgaggcggattaattgccatggtcgccgtgttgattttatacttgcttattactcgttcgcttaacagtctcaaaacagttttttcgtttgtgtttttatttggtgtacttgctcttatagctcattttatgacgaattttaacgtatttaccattttaactgaacgagctgatgattttttgcatgacggaggaagcggaaggttttcgctgtggatccgggcatttgagtttttttcatcgcatccgtttaccggaatcggtgcttttaacttttcagagtacaacttgttctactacggcgaagcgctgtacgttcataacacgtttctagagattttatcagagacgggcatgattggcttttgcttatactttagctttttatttcttgtgttaattcagcttttgaaacaaaaaattcataaacaagaaccttacttatttttaacgtttattggttttttgcttcaaatgatgtcactttcgttaattgtaaatgagctgttctttttatacttagcgctgctgtcaggctatttacgaaatcatctaagtgaggagagtgcaagatgaataactttaaatctcaaccggatcagcccctcgtttcaatcgttacacctgcttataactgcgcagccttcatttcatccactataaaatccattcagcagcaaacgtacctcaactgggagctgcttgtgattgacgactgttcgacagatgaaacggctgaagtggtaagggaattcagtagaaaagatcaacgcattcagctgcttcagcttacaaaaaattcaggagccgcagcggcacgaaacgaaggtataagcgcagcaagcggacggttccttgcttttttagacagtgatgatctatggcataggaaaaaacttaaaaagcaagtcgcttttatgcttgaaaaaaactgcgctttttcctatacagggtacagcataatggatgaaaaaggtgaagaaacaggcgttgaagtaaacgttccaaaaagtgttgactatagaatgctagcgggaaataccattatcggctgtttgacagtcatgcttgataaaaaacaaatttccacgattttaatgccaaacattcagccggaagacacggcgctttggctgtcactgctgagacaaggctatacagcatacggccttcaagagtcacttgcttattaccgtcttgtatctcactcggtttctagcaacaagctgaaagcagcaactaggtattggaagcttctgcgcaagcaagaaagactgccgttatggaaaagcgccacttattttgtccagtatagcgtgaatgcgtacgctaaaagcaaaaacctctcaaaatcgtaaaggatgtgaagtcttgaaaaacgtacttttaatcacagataaattgattacaggcggagcagaaacgtatttttgcaagctcgaaaatcagttgaatcatccggacattaccgtatacacagcagctgcaatgggagaactgtacagtaaaattcaatataaaaaacggttcacgcctttaagcaggaaaaatcatcttcacaatctttatgtgctttggaaaaaagtgcgaacgtgtaaaattgatatcgttcatgccaatagcctgcgcatggtgatgtatgcagtatgcgtaaatcgaattctgcgaaaaaaagtaaaaatactttatacaaagcataatgtaacggtacttgaacaaaaagcgaagggtctgttttgtaaactggtaaactcttttgtacatggagtgattaccgtcagccgctttgaacaagagcagttaatgaatctcggcgtaaaaagcggtaaagtgacaacgatttataacggagtggatctgaatcagtttgtgtttaaagaaaaagctgcttcactcgactgtcatatcggccttttggcacgagcttcaaaagaaaaaaatcacgagctgtttatcgaaatcgcctcactgctgaaaggtaacaaacatatgaagtttcatatcggaggaggagggcccgagctgcagcgaattcaagagcttatccagcagcaaggcttgtctgaaaagataaagatatggggagaagtggaagaccccgaagcgtttattacgaaaatggatatgcttctgttaacttctcaccgtgaagtctttccaatggttgtcttagaagcaatggccgttggcacaccgatgatttcaattgatgtaggaggcgtgaaagaagcaatagcagacggagacacgggctatttaattccaacctattcacctcaagcgttcgcagaaaaaattacggcactgtacgccgagcaagagcaaaagcagcgctttgccaaaggtgctagaaaaaaagtcgaacagcactttacgtcgagtcaaatgattgcgtcgactgctgatcaatatgtaaacgtgagcggaaaaagcttctaaaacggaagcttttttctatgaaacggtgaaccacaagttgtaaaactgcataaggtaatacaagcagtacatgctttatacctgccgagaaagcgagatgagttaaatggaaaactgcagtgaagaaagaatagtagacgctgcttgttttggtgtgaaaagagacggcatgacggatgatgcacctgcgatacagcaagcaattgattacgcagaggctaacaaattatcacgagtaatcctaacaggaaactatacgtacgccatcgcatcacccattgtgattaaaccgtctatttcgtttgaaatggacagcggaaccaaacttacagtaacgggaaattatcatgtttttacccttcaaaaagatgcgtcgatttcaggcggaaccgttgaagtgaccgacccatcatttacatcttcggtcatttaccttcacggatcgcagcaattagaaacaggaaacaaaacgacgataagcaacatcagcatgattaatacgtcaggcgcttataacggaaaaggcatttatttttactgccagaaagcgtgggattttatcagctttgtgaacgtatcctttgtacaccttcgcaactttgacaggggtgtgctgctgcaaactgaaaaaatcaccaacatcaatacacctgcatggatcaacgcgaatagctttaactatttatcgatcgacggctgtcagtatggaattgacgtagccggcatcagcgacgtgccgtatgaaacgtcaggaaacagctttgttcattttcaaatgcagtgccgcagtcaaacgaaacgagcaattaaatgttcaggtgcttataatacgtttgaagggcatatttgggatacgtatttgatgaacggaggagaaccgcccgtagaatttacgagtatctcacatcgaaatcagcttgcctctaaccttttatccacatcgattttgaacaacggacagcataatgacattacgtctccttttgaacaaacacggaatatatttgtcccaggacttccgggaaaaccggatatcatcggcaatcaagacgatatttttgtacaagctgacaaaaaatataccgtcaaacaaatcgctggaaaagctccgtacggaggtagcatcagcaactgcttcagcttagttgatgaacaaagcatgaactacctcgacgtgccagcttccgttcccgttgtgattgaaatggactttagctcgaatccaattaaaatgctgaatatggcaggcgtttcatttggatggggtgagtcgcctaaaaatattaaatttgaatatgtaacagcaatagacggcgcctggacaacggtcaaagacgtaaaaaataacttaggaaacactgtaacggcagaagtgcgagccaatacgctgtataaaatgagacttacgctaagtgaatacacaaaagaccacaagcgttttcgaattaaccgcatcttcggtacgtcttctatgatgccaggttcctcttgggttgcgacgtccggaagcaaaatgtatggaaaccttgagtttcagcaaggaaacagcctgatccttaaatctcctgacggacaaagctggaagctaagcgtcgataacacagggaaagtatcagggacaaaaatctaagtggagaaattatttttaaaccagcttctttttataagaagctattttttatgccgataaaaagtcacgagcgtactatggataggacaccccctatgaccgatagatataacgaagtgtgaaaatgaaagcagaagaatacatcagcgaaaaggggaaatgttatgggggcattacgaaatctgagtatctatcgaaagctgctagtcatggttataatttcaacaatttcacttattgcagtcgccgtgatcagctatttttacacacagcgaattgctgacagcacggagtctatgtacaatgaccgcctgcagccaatcaggcagttagggcaaattcgtacaaataaccgatctactttaatgattttgagactttcgttgttcacgtagatattttaatatataattataacattaactgttaggtaataaggtctattccaaataccataatcgtctattgagtacaattttggtacatttgatcatattcgacaaaataagacattgaacctatttagtacctatggtagtattccataagtagaaaatagattttataggtatttagatataaatgagaaggtaacaaaaagaatttttactatattataagaaagtgaggttgggacaaaaatatggagagctctcaagctcaattaagagcaaatagattaccgttccaagaagaacccgaaagaaacctagaaagttttgaagagttgccggtatatactgagaaagagtatcaggagttaaataaaaaacttgttatatttaaagaagaaacattcgaaaaattacaaagctacggtgtgttaattaagttgtttgaagaagaagtttcaaacaaaaaagctttagagagccagttgaaaataactcaagatcaaatgcatgaattgaaaacagagttagttaatacccaagcagaaaacaaaaaaataaaaagagaactgaatgctctgaaaaattctaaacttggaaaattaacaaaaaaatactggtctttacgtaagagattgcataaaggagcaaataagtcatgaaagatctttcattgttaaaatctgattttgctaagttccaaagtcaaattttgaatgatatagccccctatttaataactaatcaatcatttctaagagctgaaaactggttctatcagtctgctgatatttttatgtacaatcaaaaagaaaaattgtttatatcgtctgagagtgagaacaaaaattatatctcttacttggagaaaaacaatagttttagctatttgcctactcacgatttaaaaacgttacctaatgaagagtttgaaattcaaattaaaggagaaatttttggtaaagctcatataaacttaatggttattgagtattcaggtagcaaaaaaattaatgttcatgctgtttcattaaataaagttacaagaataaagatgaatcaaaaaactcaaaatcttcgtctggctctgcgcatttcaaataaaggtattgccactattgaggatatttatattcaaagaataaagcaagaaatccccaatacgtatgtaccaaaccctaaaaaaatctccaagaataacccgtctacaatcagcgatattaaaatggcatgtattttagatgagtttagcatgacttgctttggaaaagaagttaatttacttacttttacaacagaaaattggaaagaaattttaattgaaaacactccagatcttttgttcgtagaatctgcttggagaggtaattttggagcttgggaatataaaatagcaaaatataataaccaagacaaaacccctctgtttgacttattaagatggtgcaaagaaaacaatattcctacagtgttttggaataaagaagatccaattcattttgaaaaattcattgatactgctaaattattcgattgtatcttcacaacagatgcagatatgataccaaactatcaaaaagaatcaggtcatgaacgcgtttttgctttgcctttttctgcagagcctcaattacacaacccaatcaaaatacgagagaaacgtgaagaaaaaatttgtttcgcaggttcttattacgataaccgtcacgaagagcgcaaacaagatatggataatgtgttagacattgcagctgagttcggtttagatatctttgacagaaactatgagaaaaataaaaatggtcgcacgcattttagctttccagagcgattcgatcagaatattaaaggtagtttgaagtatgatgaaattaatacagcatataaaggctacaaagtcatgctcaatgttaatagtgttaaatactctccaactatgttttctagacgtgtatttgaaggtttagcatgtggaacgcctatcattagcagttattctgaaggtgtaaagcgaatgtttaaagatattgtattaatatctgaaaacaagcaagaattaaaagaatctattgaaaaattaatggacgatgaagaatattacaatgaaaaatctttagttggtatacgagaggtttatctgaatcatacatataagcatcgaatccattatatgttagaacagctagggataactgtcaaaaaagatattaagaatgtttctgttttatctgtagctaaatctaaagtagaattttttaatattcttgattcctttaagcgacaaagctggaaaggaaaagagttaatcgttcttttggaaaattttgatgggtatatagatgttttaaatgagtataatcaagaaaatattaagacatacgtgctgagttacatgaatcattacaacggttttatgatggtttaaaagaggaaaatcaagaaaataattaagcaatcgtgctgagttacatgaatcattacaaccgtattaatgagattatatctaacccttatatttcttattttaatccagacagcttctatggagaaaattacttacttgatttaatgattgcgacagaatatagcaatgcagaaattattggaaaaaatactttttatcaatatgatttccagaataaagaagtaactaaatataatcaagataaagagtaccaatatgtagacagtctgcagtttgagtcctcaattgtagataaatctattttccatggagaaaatataatagaagcggtaacaaaaatgagatcaaacagctcaatggctttgtattttatgagaggctttagattgctaagcattgataactacaactttattagagctggagtaggagtttctgaagatataattaataaaattcaaaaataggtgaattattaatgagaaaaaagttaaaagtgcttttatatggtgatgtagatttaaacattatggatggttcagcggtttggttgacatcgatggcgaacgtactaaattatgacaaaaatatagttgttgacgtattgttaaaagctcggatcaaaaatcgaaacttactttctgaaatagaaaatttaagtcaagttaacactattgatacatttaatctatttaataagaaatttgaaaatggtaatcgtctcaatatatttgaagcagtaaaattaatggaagaattaaatgaggtcaaccaatacgattgtattattgtgcgtggatacaagttagcaattgaattaatgaagagtcctttatcgtcaaaaattgtaccgtattttacagaattcacacataatccagacgaaattacgagtgaagaaaaacaagttcttcaaaaaatttatagtacttttccaaaagtatttgtacaaacgaatgaaacgaaaaacttgttaaacagtattttgtcggtgaaaggtgaaaagttctgtttactaacgcccatgattcctgattatggggaaacaccggattttgttaatcgaaacaacagtttagtctatacggggaaatttgctaaagggtggtacacagaagaaattttagatgcatttaagtctgtgtatgaagaagatcatagtcttgtattaaatattgctggagataaatttcaaggggaattaatccctgaaaaagatcgcattattaaccgttttaatactgaaagtaatgtaaattggttgggtgcgattccgagaagtgaatctataaaacttgtggaagaatctgatgttggagttggatggagaagcgagttaattgataacgacactagcgtagagttatctactaaaatattggaatatggaaggcaaggcaaaccagttttacttcgtcgaacaaaaatgtacgaagatttgctaggaaaagattatttcttgtttgtagataacgaagaagaattcgtaagaaaaaccctagaagttatgtataatcgtaatctttataagaagacagctcaaactatttacaatgcatgccgatattatacatttaaggaatcatataaacgtttaaaagacatgctatggagctttaacaatcaaaaaaccaagctattattcgcgggtcatgacctgaaattcattgacatggcgcttcaatattttaagcaaaattcaaaatttgaagtaaaggtagatcaatggcagggacataataaccatgatgaagtttacagtaaagaatgtttagaatgggcagatgtgattttttgtgaatggggattaggaaatgcagtttggtattctaagcacaagagtattgatcaaaaattaatcgtgagaatgcatttacaagaacgagtcacagagtttccaagtcaatttcatatagaaaacatagatcagattatagctatttcgccctatatatttgaagaatttcacagggtgaatcacattccaagaaataaaatgactatgatttataatatggttgatacgatgaaatttgataaacctaaattgaataaagaagaaatacaatttaacttaggtatatgcggtattcttccgagtagaaagcgcttggatcgggctctcaatatatttgagggattatggaataaagataaaagatacaagctgtttgtaaaaagtcgtatgccacaagaattatcttggttaatgaatagaccgcaggaaaaacaatattatgatgaagtatttgaccgtatcaaaaaagccccgtggggtaaaaatgttgttttcgatcaacacggcaatgatatggacaagtggttccagaaaataggttatgtattatccacaagtgagtatgaaagttttcatttggcacctatggaaggaatggctgcaggcagcacgcctttgttgttacactggcctggtgcagaaactatctacccaaaagaatatctcttcaatgacgaggaagaggtgattacatatgtatgtaatcggaagaattacaaacagaaaattgctagtaaattgaagaagtattcacaaagtgaatttgataaatctgtaattataaagaagatagaagaagttattttattataattagattgtagaaattattgaggaaaaaggagggactttatgaataaggatacctctgtaatagatatagaatatatttttaatgttgatttaacttatttgtttaaacgaacagatgtacaggggaaagcagctgtttcaagagcagaagggatttataaccataatatatatcttcatcaatcgcttcctgaaatgagatttgagaaggctgacgatatttggtctctaagtggagaacctgaaaacacctataaagtatatttatattcattacaatttattagtttattgaataacggatatgaacagtctaacgatttaaaatatctgaaaaaaatagagcaaatacttgagagttggatttcctttgagagtaattcgactgataagcgagtatggtatgactttgccgtagcaaaccgagtaatagtaataacccattatttaatgttatgtaaaagagcgaattatgagttaaaccctgtttttaagaaaaaaatggctagtgctatgttgaaaaatggagaatatttattttcagatgagcattatgtagataataatcatggaattatgatggaccgggcgttgttgcaattatctttgttctttagatatgaatcatttggtgaaaagtggctgaaaaaggctattaatcgcttagaaaaacaaataaaaaatagtttcactaaagagtatataaacgttgaaaattcacctgaataccattatcatacataccatttatttgaggagctacaagcatttttagacattaataaaattaatttagcagaaaatacactcggctacatattgaagggaatttataaacaacatcttcatttattaaagccagatttaacgtatcctcttataggagctgtctcttatacacattccgagcccacgagacaggcagaaatctcgtatgccgtcttctgcttgaaaaaaaaaaaaaaaaannnnnnnnnnnnnnnnnnnnnnnnnnnnnnnnnnnnnnnnnnnnnnnnnnnnnnnnnnnnnnnnnnnnnnnnnnnnnnnnnnnnnnnnnnnnnnnnnnnngttatagagatactattaaatttcattttaaatccataccttctggtaatattagcatttggctttttattcgtaataaagatgatcatggtattcaaattttgaaaaaacaggaaatctcacagatttaaaactttaataggggtaaatatgaaagataaaattttagaaaatgagaaggtatttaggtctattcaagacgtaacatattattttgaagagggtgaagtaaaagatcacctaataattgtgttttcagctgttaaccctcctggaacttttgcttataattatatttcaactttagaaaacttgaattgccataagttatttattctagataattatggagaacaaggagcttattatttagggcataaaaaagatttttctatcgaaacttctgtaatgtctttaattatgtctatcgttgcgaaatatcaggtgaaattgaacaatgttataactgtcggttcctctaaaggtggctatgcagctttatattatgcattaaaatatggatttggacatgctattgctggtggaccccaagttaaattaggtgattttttatacgatcaaggcaagaattttgagattgcaaaatatatagcaggagatctcaaccaggaaaatcatgaatatttaaatggtttacttatgagtattattcctgataaagaacatgccttaacagatatttatttacatgtaggcaatggtgatcatcattatcctaaccatatcattcctttcattgaatgcttggatagtctcaaacatgagaactaccaattagatgttcaagaatacgagagccatgatggtttgagacaatttttccctccttatttatgtgaaaagctaggggagatcacaggaataccttcatatgagataaatcctattaaaaggattaatttgggagtagttaataacacatttacagtagaatgtgtaactacgaatactccaaatcagaattatcaatatgcatattatatatataaggacaacaaagtgtatgaaaaaatcttttattcaaaagcaaataagttaaattattctttggataagtctggtttatataaatgcaaagtattcgtgaaggatcaacatggaagaaagtatattcaaatgagcgagtcagtaaacattcaataataatttacaagaattttttaatagagagggttttagaaattatgaaattatgtacagtgggattaggatatattggattaccgacttcaattatgtttgcaaagcatgatgtagaagttactggagtagatattagtccacgagtaattgaatcacttaataatggaaaaattcatttagaagagccagggttacaagaagctctaaatgaagttattgctaaaggcacatttaaagcagctttacaacctgaaaaagcagatgcatttatagtagcagttccaacaccaaacaataatgatgagaataagtcatgtgatttgtcatatgttttaagtgctgtaaacatggttattcctcacttagaaaaaggaaacgtgctaattgtagagtctactattgcaccaagaagtatggatgattatgtaaaacctgtattagaagctgctggatatgagataggtaaagatattttcttagtacattgtccagaacgtgttctaccgggacaaattcttcatgaattggttcataataaccgtattgttggtggaatgacaccgaattgtacggaggccggtgcaatggtttatagtacattcgtcaaaggtgaaattattaaaacggatgcaaaaacggcagaaatgtctaaactgatggaaaatacatttcgtgatgtaaatattgcattagccaatgaattagcaaaggtttgtaacgaattagaaattaatgcgttggaagtagtagaaatggctaataaacaccctcgtgtgaatcttcatacgccaggtccaggtgtaggaggacactgtttagcagttgatccatattttattgtagccaaagctcctaaaacagcacagcttattaacttagctagaacgattaatacatctatgcctcattatgttgttgagaacgctaataagttaatgcaaaaagtagatgggaaaattatcacagtatttggtttaacatataaaggaaatgttgatgatatccgtgaaagtccagcaatggaaatttatgatattttaaaagcggaaggcaaatatgaagtacgtgcatttgatccacatgtagaacaagagtgggttgtaagtgatattaaggatgctgttcagaattctgatttagtattaattttaagtgatcataatgagtttaaagaattaaattgggatgaactaaatggaatgtctacgaagcaaatttttgatactaaaaatattgtgacaaatcgttcagataattttagttacattaactatggaaatctacatgtatctcttaagaagaaagaagtaatggcatgaattttatagggaggattttgcaagaacaatcctcaaatcttcacttaatatttcgattagctctttatgatataaaaagtaagtatcaaatgcactatctaggagctgtatggcagtttttaaatcctgccatacaagttcttttatattggttagtatttgggttaggaattagggggggacaacctatagatgatgttcccttctttgcatggttaattgtagggttaataccctggttttttataagtcctgtaattattcaaggagcaaatagtgtatacactaaggttaacttagtttctaaaatgaagttccctgtaagcgtattgccaactattacaataattagtaatggactgcaattcatagtaatgttactagtattaggagttatctttttagtgtatgggattaatccaggaatatatatagtacagttaccttactatatattctctttattagtttttttatttgctttcactttattgttttctacaatttctacaattatcagggattttcaattagttttgcaatctgtaatgagaatgatgctttatttgttgccagtactatgggatacatctaaactgcctcatttatttcaaactatccttaaactaaatccgttatattatatatatagaaaatacgtagtttcagctatggcacataatacaattgtcgttgacgataagaactattcactaaatttagataatcaaaatcgactaggaattagtaattatcatttagagaacgactttgctgtagtagaagtcactaacaatttatatgaggatataaacataactagaagattaattcatatatatcctaatctgattattttggtagatgatattaaatcaagtaacgatcataaatattcccaggttttcaatttgaacggaacacttaattttaatgttatgactaaagagcaagcaattggtcatcatcataaagggaatttaaagctagaaatgaatcagcatcttccaacggattatatttcttcttatcatgggtacgaaaatgaggaaaatattagaggttttaattcaatttcttttgctaagttagaaccatgttacaatatggagtttgttcatcagaaaaaacgtgaggctaaatttttaacctctattctagcagctgaagacaatgctattgacaatgaagttaaagaatttactcttctaaaagaagataaaactaacctagtattttctgtagaagataataaggggatacttaggttatatcactatgagtacaccgagggcgttaagaaaatttttgatataaaggacattttatacaaatattcagtttcttctcgtgagctagtaatcgatgtgaaagatgatacatctgattttgaatttgcttgctatttattagttaataataaaatagtaaaaaaagaaggttatagagnnnnnnnnnnnnnnnnnnnnnnnnnnnnnnnnnnnnnnnnnnnnnnnnnnnnnnnnnnnnnnnnnnnnnnnnnnnnnnnnnnnnnnnnnnnnnnnnnnnnctattaattggttcatttatccatataaagtttagagataaatttattgattacctgtaatcaaggagttaatttgatgaagttaaaggtacaatttgatgaagtaagcaaaaagtatatactatataaaaaaaaatcagataaacttttagatattttttctagtgagaaaaacgaacaatctttttttgccttacgagaagcttcttttaaagtttacgaaggagaaacaataggtgtagtaggaatcaatggatctggaaagtcgactctatcaaatctattatctcaggtggtaccacctacgtcaggtaatattgatattcaaggggaaacttcattgattgctatctctgcaggtttaaacaatcaattgtcaggcttggaaaatatagaactaaaatgcctaatgcttggattaagcaaagaagaaattaatgaaattaaacctagtataattgattttgctgatttgggtaagtttattaatcagcccgtaaaaaactattcaagtgggatgaaatcccgcttaggttttgcaatctcagttcacactaatccagatatattagttgtagatgaagctttatctgtaggagatcaaactttctatgataaatgtctcaataaaattaatgaattcaaaaaaactggaaaaactattttctttatcagtcattctttatctcagatagataacctttgtgatagagtcttgtggttgcattttggagaggttaaagagtttggggacacagatgtagttttagataattatagaaactatataaagtggtttaataaattgactgaagatgaaaaaaagagttaccggctagaaatgatagaaaaacaatctcaagagcaaacagttatgtctcagtccactaaatatcctatatatccagtaaatgaaagaacaaaaagacgaaaaagagagaatgcaaaaagtggaagaaaaaaattccacttacaattattctcgttggcaagtgttgttttgattttagcaagttgtatgttttattttaattaagactttacattttaggaggaaatatattatgtataaaaaaatgctcatccctattttaggaatatcttttatttttgcaggttgtagtgcagataatacagctgcccctgaaaaacaaaataagtctcaagtagaagataataaatctaaatcagatgctaaaattaaaaatgttactatcgaaaatggaaaagataatgttcttgaagttacagcgaaggcaactggaaaaggcgtagagtatgcctattatgtttataaaggagaagatatcgtaaaaaaagtttattatacttctaacactagtttcaaatacaaagctaaagagccaggagagtataaggtcactgtctttgtacaagataacacagggaaacgcatatctaaagatacagacacagttactataaattaagaggtaagaggttatctataagtcatatgacttagataacctttttttatttaagagtcgaaggtgtttctcgtcaaagagtaacactcaaagttcacctctcacatacaagcgtcattattccatgtgtaacaaacattatcagtcgaacaaaatccccctatgttttaagttaaatcgttatttaaccctttatgaagcgtatagtacaatctatgatagtaggcttttgttgaagtcaacatgaataaatgggcaaacttggctagccagctataaacagttagaaagaaaaataattgccgaacataatattagtaatgaaaaggtaaagctgatttactatcaagattatatcgagaaatgctaaaaagggatggaagaagctaagcagttactaagtttacactttgaggagtacaagctaagattattagtgaagataaggatatttggttgtaggaaatattattaaagagaattaattatagctattataaaaaagagtactataatttttcctacttaatttattttgtttcgttgaaaacaaaacttgttttttagataaggaattataaaatggagtgttttccaattaacaactctaggagatgtctttaatgttaaagaggaattctattaatgttttatttttagtttctattctgcttgtccttaggttaaccatgtttccagaaagttcgttaggcattggtgaaggaaaaggtggcatcaatcttgtgccattctacacaatgagggatttattatttcatcattcatttagcgactttattctaaataatataggaaatattattttgtttttaccgtttggttttttcttagctatgagatttaggaaaatagataatttgccaaaaagtttcctcgtgggaatgttcttttctgtactcattgaaatagttcaactatttatgccaaatcggtggacagatattgatgacgttctcttgaacactttagggacgggtataggatatagtctgtttaagacgctaaactacataaaagaagtctaataacggccttcttgtggtttgtaaaggggagaaaagatttagcccaaaaattgtagtttatccatatgaatatttgaaaaacaaactatataattccgggagagaaaaataaagtgttaagaaaagaagcaatcataagtatatatgtaaaaaagatctctatattctagagatctttttgtatctgtatagtaaaaataaaaacagcgccccaccaaatgaatcgatagccacatcaataattcgcccgtcgcgtccaataataaacgcttgatgcagttcgtctaaaaaagcaaaacaagcgagtaaaacccacgcttttacatatctccatgaattttttttcaaattccagtaaattaatagggctaacaagccgaagaaagagatatgagcaattttacgcaagataaactctaggttaaagccgtatgtataagacgtataaaattcactgccaggatgtaacacagaccagagagtggctttatgattccagactgaagcattgctccaagagtttgggtccgtcacttgaaggtgaggtgtgtgggaaaaatgggaaatagcaagtatcatcgcaacaacacaaattctttttaatatcatacaaaaaattccttttgtttttagatttatcttcatatcgtaagagaaaagcagtgaaaatgcaagaaatattcatgtgtctctctatatataaatcctcttctaaaatattttcatatagaaatatcaattatttcaagtatgggtgacagaagttctaacatattactaaatttagaagaatatgagactatcagcatttaacgacataaaaaggtcttttgaagcgaaaatattatcttttcattcaaaaaccttgttatatcgcaaatttcgacaaaaaaattcatccctcttttcctatttttgtgataacattaattttgcgattgcttcataagttataggtctaatgactgttaataaaatcttatagaaataattgagaatagataagataaatgaactataaaaaatcattgtagataaagtatcgaagccttagaaacttgttgaaattaaagacaagtttttaatttttatctagtgaaggatgaatattcaagaaaagtcatataaagcgcaatatgtatggtgatgtctcctcagccactatcaaaggaggcactcggctgcactgtgggtagaaaactaccttagacacgtttgttgtcaggagtgtggtgtgaggtggggttaaatgccccaattaatttataagcacttacgaatgcgctgttgctgcagcttgttcgtaagtgcttacaaaaagtatatataaataggaagaaacaaggagtgaatgaggatgaaaaaaattaaaaaagctattattccagctgctggactcggcactcgttttttaccagcaacgaaagcaatgccaaaagaaatgcttccaatcgttgataaaccaactattcaatatatcgtcgaagaagcggttcaatcgggtattgaagacatcatcatcgtaacgggcaaaggaaaacgcgcgattgaagatcattttgattatgctccagaacttgaaaataatttagttgaaaaagaaaaattcgatattttagaaaaagtgcgtcaatcctcaaatgttgatattcactatatccgtcaaaaagaaccaaaaggattaggtcacgctgtatggtgtgctcgtaactttatcggcgatgaaccatttgccgtgttgttaggcgatgatattgtccaagcagaaacaccttgtcttcgtcaattaatgaatgaatatgaacaaactctttcgtccgtaataggcgtgcaaacggtttctgaaaatcaaacgcatcgctatggcatcgtagatccaatttcaaacgacggccgccgtcaccaagtgaatacatttgtagaaaaaccagccgcgggtacagctccttcgaatctagcaatcatggggcgctacgtcttcactcctgaaatctttaaatttttagaagaacaagaagtcggagcaggcggtgaaattcaattaaccgatgctattcaaaagctaaatgaaattcagcgtgtatttgcgtatgactttgaaggcaagcgctatgatgtaggagaaaagctaggatttattcagacaactattgaatttgctcttcaacatgaggatttacgagataatttattaacaattatggaagatttattgaaaaaagaaacgaagaagccggtagaaatagagtagaatagaaggagtgagttgcgttgccatcaattgctgaacctaaaacggaaacttctattcaacaaacacaagtggtacaaaagaaagttcagcctaataatcaagccgggtaccttttggcgaagagatgtgtagatatagcaggagcaatcgtcggtttacttgttttgtttgttgtttttcttattgttggtcttttaataaagctcgaagacccgaaaggttcaattttcttttctcaaaaaagagtggggaaaaatggtgaagaatttaatatgtacaaatttcgttccatggtttcagatgccgaagcaaaattagctgcattgcttgaacaaaatgaagctacgggtgcgatgtttaaaatgaaaaatgatccgcgtatcacgaaaatagggagattcatcaggaaaactagtattgatgaactgcctcagttaatcaacgtcttaaaaggcgatatgagtctagtaggtccacggccgccgcttgtaagagaagtaatcgagtatacagaatatcaaatgcaaagattgcttgtcactcctggctgtacaggactatggcaagtaagcggaagaagtaacgtagggtttgaagaaatggtcgaattagatttaacatacataacaacacgttccctaacggccgatattaaaattatatgccgaactatttttatgctgtttggctcgaaaaatgcttattaaatcaaggaaagctggtgtcttaaaatgaacaaaaattcgaaaatttacgtagctggtcatagaggtctcgtcggttcagctatcgtacgaaaactacaagaaaaaggctatagcaatctagtgtatcgcacaagcgctgagctagatttaagagacaagccgacagtagacgcattctttgctgaagaaaagccagaatttgttttcttagcagccgctaaagtaggtggtattgtggcaaacaatgaatatccagcggaatttattcacgataacttattgattcaatcaaatattattgatgcagcatatcgcaatgatgtagagaaactattattcctaggaagtacatgtatttatccaaaattagcgcctcagccattaaaagaagaatacttactaacaggtgagctggagccaacaaacgaaccgtatgcaattgctaaaattgctggaatcaaaatgtgtgaatcctataaccgtcagtacggaacaaaatatatctcggcaatgcctactaacctttacggtccaaacgacaattttgaccttcatacatcacacgttcttcctgcactgcttcgtaagttccatgaagcgaaagaaagcaatgcgccgtttgttgaaatgtggggaacaggcacaccaaaacgtgaatttctatattcagatgacctagcagatgcgtgcgtattcttaatgaatacatatgaaggcaatgaaatcgttaatatcggtgtgggagaagatattacgattaaagaacttggcgaaaaagtaaaagcagttgttggttatgaaggaaatattcagtttgatacgtcaaaaccagacggaacgcctcgtaaactagtagacgtaacaaaattgaacagtcttggctggaaagcagaaacagctttagaagacggtcttcaaaaagcgtatcagtggtttttagataacgaactagctgcagcaaaataattaaaaacttcaattaaattaaatactaaaataacagttgatatatatggaggatacgatgaaaacagcattaattacaggtgtaacaggacaagatggatcatacttagcagaacttttactagaaaaaggctatgaagtgcacggactaattcgccgcagctcttcttataaccaagagcgtctagaagatcttttaacagaagaagcagcgagcgcattattaaacaactcaaacttccaccttcactatggtgacgtaacagatgcattaaatgttactcgtattattggtgacattcagccagatgaaatttacaatctagctgcacagtcacatgtacgtgtgtcttttgatatgcctggatatacattagatgttgatgcaaaaggtacgttaaacattcttgaagctgtacgtattttagggttaacagataaaacacgtgtgtaccaagcttctacatctgaactgtacggaaaagttcaagaagtaccacaaaaggaaacaacacctttctaccctcgttctccatatggcgtagcgaaaatttacggcttttggattacaaagaactaccgtgaatcttatagcatgtttgcagtaaacggtattttatttaaccatgaatcagagcgccgcggcgaaacgttcgtaacacgtaaaattacgcttgctgcttcacgtatcgcgcaaggcaagcagcaaaaattaacgcttggaaacttagactctttacgtgactggggttacgcaaaagactatgtagaatgcatgtggttaattcttcaacacgataaacctgaagattttgttattgcgactggtgaaatgcactcagtacgtgaatttgtacagcttgcattcaaacatacaggcattgaaattgagtggagcggtgaaggtctagaagaaaaaggaacaaataaagcaacgggtgaagtgatcgtagaaatcgatcctaagttcttccgtcctgcagaagtggatcaattgttaggtgatccaactaaagccaagactttattaaagtggaaccccactaagacttcgtttgaagaattagttcgcattatggtggaagcggacatgaagaaggttgaaagcgaagagaagattaaggtgatgtttgattaataatagtagcttacctttttccgaaatataggaggatggcttgctgagttaaatacttagcaagttatttttgtttttgttaatgtacgaaagcagtaaaaaatataaattataataggaaagagattgattaatggttgtaaaatcgaaaacggaaaagagaaaacttctaatatacgcacattactatacacctgatgtagcgtctacaggtcaattattaaaagaattagcagaaggtatgcttgaagagtttgatataacagttatatgtgttgtgccttcttacacagggaaggtatctcctgaatataaagtgaaaatgttccataaagaagtaattaatgatgtaaatattcttcgaattcgcgttccagagttttctaaaagcaataaaattagccgagttaaaaatattcttgcctatttctttggggctgtagtagctacttttaaagttggaaaaatggactatgtttattctatttctcagccacctatacttggaggtctattaggagtatgggggaaatggatgaaacgagcaaagtatatctacaatattcaagacttcaatccagaacaaacgatggcggttggatacagcaaaaataaatttgttttaaaaatgatgatgagttttgataaatttagctgtaaacaagccgataaagtaattgtagtaggtcgagatatggttgaaacgctaaaaaagagatttaaatacaagagagtgccaagctatgcttttattaacaactggacgaatgaaaaagaaatttatcctttaccatctaatcacgaaaaagtagtagcttttaaaaagaagtatggtttggaagggaaatttgtagtgatgtattcaggtaacttgggtctttactatgacctagaaaacctgatgaatgttattaataagttcaaacatcgtgacgatgttgtttttgcatttataggggaaggttctattaaagaaaaacttgtctcttataaagaaaatcatgatttagataacgtcaaattcattccatatcaagataaagctgatttagtttacagcttaaacgcaggcgatgttcactggtgcttaaatgcaaaaggtattaaaggcgtatcggttccgagtaaattatatggaattattgcagcaggtaagccaattatcggcgctttagaagagaattcagaagctagattgataatagaagatactaagtgtggttacgtaacggaaccaggaaactacgaagaaattgaaaatattattaatacttttctgaatgaaaaagaaagtaatgtactagctggaatgagtgaacgtggaagggattatttagtaagtaatttaacaaaagatgtctctgtacacaaatatatcggagaaattaaatcttcataattgatgattaatatctagaaaggatatctatagaatgaatagcaattggtttaagctattaatgaaagctatgaaaatcgactatgggaaaaaccttttgttaaaaggtgtacctgtaatctttaataaaaaaggagcgaccctaaaaataggaagaaatgtcgtaataaaatcttcgtttttatcaaatttagtaggcctttaccaacgaacgattattgtaactagaacatcagaagcagaaatacacattggtgacaatgttggaatgtctggtgcgactatttatgctagaaaatcagttaagattggaaagaacactcatattggtggaaacgcaaagattttagataatgatttccatcctttagaaattgaggcacgtaatgctgataataaagagaagattggtacacgaccagttgttataggagagaactgttttattggatgtaactctttaatattaaagggaactgtactagaagatggatgtgttgtaggtgcgggagcagtagtatcaggatattttgaaaaaaatagtattatcgctggcaatcctgcgagattaattaaaaaagtacaatcctaggagatagggatatggcgaaatttacattttttactttagtattagcatttttttatttaggattctttttaaaaaagaataatagaattcaaaaatatagattaatggataggaatcatacgactgttcttaaatcactagctatattaatggtagtttggggacatgttggagcaacattaggagtatccaatatacaatttatcgggggagtaggtgtttctcttttcctaatctgctctgggtatgggttatttacttcctataaaataaacaaagaaaaatatggtgaagcggatgctctaaaagattattggaaaaagaagattattaaagtaataattccatactggattgtcgaacttataggcttaggagtaacacacaaatgggacattggtgtagtaattaaagatttattttttattacaccagccactccatatggctggtacatgcaatatttaattatttgttatattttattttgggcggtaacgaaattaaaagtttatattttaatttcaaaatataattttcattattatttaattgctggtttcttattatggtttgtaacagaaagtttattttttgccaatcctgatatgccatttctaaaggcaagacaaatgttttcatttcctttaggagttttattaagcttgtatatagatcgtatcgttgaaattttgtctagtaaaaaagttactgtatattttatgttaataggaatgtttggcttatttgtaactgtttttagtcaattaagtctagtaaagaaattaccttatttaatttcaaatactatatccttatttactgtcttacctatagcacttagtatcatagtaattactatggctgtaccatttatatttcaaaatcaattcttatatcaaacgggtaaatattcatatgaactgtatttaattcatgcttttagtttagatttaattgataaatctataattaacctattagagtttatacttgtaacattaatattagtaatcggtttgtctaaattgcagaaaataataaagattaaagttacatctaatttggataggaggaaatatggtagatttaacggtggttatccttacaaagaatgaagaaaaaaacttaaggaagtgtatagagtcttttaggggaatcgcgagtaggtttgtaattgttgatagctttagtacagatgaaacggaaaagctttgtagcgaactaaaccaagaattgcaaaaaatcggtagttccttagacttttatcaaaataaatgggtggattatgcgactcaattaaattggggactaactcaaactaatattactacacagtggtctatgcgaatggatgcggatgaagagttgttagaagagttagcattagaaattgatcaaaatttacctaaactaagtgaagatattaacggtgttgtacttcgtagaagagtctactttatggggcgctggattaagcatggcggtagatatcctgaactgttgttaagaatttttaaaacaggaaaagcaatgtgtgaacaaaaaattatggatgagcacatgattttatctgaaggaaaaacaattcagtttaaaaatgatttaatggataacaatacaaaagatctagaatggtggacgaacaaacataattggtacagtaatcgtgaagttctagatcatcaattgacaatggaaaaagcatttgaaagtaataactcattagaaagcggtcagtctactaaacaagcaaaagggaaacgtattgtaaaaaataagggatactatagggtaccaaaattctttcgtgctcatttgtattttatttaccgatattatataaggttgggatttcttgatggtccagaagggaagatttttcattttcttcaagcttattggtatcgttttttggtggatgcgaagatgtatgagtgtgaaaagtatgataaaaaaatgaaacaagtggaagatttaaaagcttaattaccattattaaaaaaggagcaataccatgagtaagggcaagaaaaatatattaattattatgggaaggtacttgccaggatacaaagacggcggtccagttagatctatcaaaaatctcattgactttataggtgatgagtataattttcacattcttacttgtgatcgtgatcatggtgatgtagagccttatcctaatattaaagtaaatgagtggaatcaagtgggcaaagcaaaagttttctatgttcctcctaaaggttttacttttaaagttattaaaactttagctaaacaagtggacctattatatatttgtggatgctttaatgattatgcagttcatacgctcattttaaaacgattagggtttataaaaaagcccgttgttgtagcggccatggggcttttctccccaatggaatttcagctaaaatataaaaagaaaaaaatatttactacaatattcaattcactgggattatttaaaaatatctattggtccgcaacttctcctatggaaatcgatgaaatcgctcaacaaattaaaatacatgataatttctttatagcggaagacctccctagaaaagtagatggcacttctataaaaaaacataaagaagctggaagcttacgagtagtgtggatttcaagaatagcacctaagaaaaatttgctaggaactattcaaatattaaaaagtgttcgatcgcaagtggaatttacaatttatggaccgaaacatgtagaggattattgggagaaatgtgaaaaagaactgaaatctcttcccaaaaatatagattggtcttggaaaggaaatattgaatctgagaaagtagttgaaaatttaaaaccttatcatttatttttatttccaactttgggagaaaactatggccatgttatccaagaagcgttgtctgccggatgcctttgtatagtaagtgaccaaacgccttggagtgacttagatttacatgaggcaggttttgtatttccattagataaccttgagttgtatgttaaagctttggagtcctatgccgatatggatgaaaaagaatttcaaaatgtttctcgaaaagctaaacaatatgcattaataaaaaatatagaaaaaatagataataatggttatagggaaatgtttaataccacttataatagtgaaaagacattggaggaaactattcaaagtatccaggcccaaaactatccaaatttagagtatctaattatagatggaggctcaaccgataatactttgaatattataaaaaaatataaaaatgtggttactaagtggattagtgaacctgataaaggaattagtgatgcatttaataaaggcattaaaatggcaacaggtgaaattatagggataataaattcagatgacatgcttgctcctaatgctctaaacactgtagttaaagatatagaagacaatacagacgtattatacggtaatgcaattatgtttggtaacggagaaaagtatagatataaatcggaaagtgatttaacaggttttaacaaaaggtttcctatagtacatccaactgtattcgtaagaaaaagatgttatgaaaaacatggactatttaatattaattataggtgcagtatggactatgaattattaattcgcatgtatgataactctgccacttttcaatatttggataaagatttggcctttatgcgcctaggcggtgaaaaccaaaaaaactatattaaagttacaacacgggaatgtaaacagatttcaataaatcatggcttatcaaactttcaagctagtttaatcagaagtagatccatagccagatttctaattgcgaagttcataaggaaaacaccatttgctaattttattagaaaatttatacattctaataaaactgaattagatatatgaggggtgttagaaattagaaagctacttaaagaactaaggtttttaccatctaaacttcgtaattatattgtttttcgcatgaaatacgtcgatataggaaataaagtaaaagtccgtggatcaatcaaaataataggaagagggaaaattactataaaagatggaactgtaattaattcgtctccttatgccaacccagtaggtggaaagcagcaaactgtattttatgtaattaataatgcaagtttaataataggagaaaactctggattgtctaactccactatatgttgtagtaatagtataattattggtgataacgtcaaaattggtggtggatgtgaaatatatgacacggattttcattcattagattacttgaaaagaaggaaaatacttgatgattcaataaagtcttctcctataaaaattggtaatgatgtctttattggagcaaatagtttaattttaaaaggcgtagaaattggagattgttctataatcggggcaggttctgtgataactaagtctgttcctaaaaatgaaatatgggcagggaatccagcacggtttataaggaaaataaactaatttatttttaaatgattaaaagaaacaatttcatgcacatggtaaacgaaacggattatgggctatataatatattagattttttattgtgcttatcataaccttaaattagatgggcttattcaatagtattattcttaaacatttttaattaaataattgtgagattaaactcttatctttttatttatagaatgtgaaatgaaatttaatgagtattgatacacactctgggttatcgaacttatttccttctgatcttattcttgttatgttgttaatagcactttttgcaaagaaatttgctaaaggtgatgatagaatcaaaaagaaagtggttataatttactttattctaatatcgatgttattgatggggctgttttcatctgcatcgataggtaatattttcagggactttaaaatatttatttatttttttgtaccttattcatatttgaaatatattaaaaataattattcttttcaaaaaagtaacttaatactttttgcagtgcttatcataacctcattatttttaaattgggttaatttcctaaagacaggttctgttaatctagaaaattacgggatcatccaaaggacattcggaattggattaacgtttagttcagctgtcgtcttatctagttttattgcagtttacaaagatagatttgttaaaaaagctggaacaataacatattatattttacaggtgttttttttattttcaattatagtatcttttactcgtactctatggattacttatttattggtacatagtctaagaatcatttttatcagttggagaaaaattaaattaaccttgttaaaagatttgctaattatttttcttttggtacttgcctttacttgtattttaaataatttaaaacaaagtgagaatctttattacaaggcaataacgcacagaatagacgaaatacaaattatgacacctgatgataatgacacgttgtcatatcgtttaaatgatgtatcttctgcattttataagctttactcaccaagaatcatatttggatatggttttggcgacactcgtgcaacttatggatacaatgcgatggagttaggtaacgaagaatttaatacggagagttcattcttttactatatttggaaatatggtataatattcgcattttatttgtttattaaggtaataagaaaactgtatgtcttattcaatggcacaaccaaagcttcaaaaatgatgtctattttcctaattgttcatatgcttataggttcaatgtctggtaaccttaataacgtttatagtattgcaatatttgcattctatataggnnnnnnnnnnnnnnnnnnnnnnnnnnnnnnnnnnnnnnnnnnnnnnnnnnnnnnnnnnnnnnnnnnnnnnnnnnnnnnnnnnnnnnnnnnnnnnnnnnnngtataagaaattaattatgatatataaagaaagtagagtttttaatatatgaaaaacaaactaaaaatactatatattcatcacggtgccagtcaaggaggagcgcctagaagtttaagttttcttatcgaaaaattggataagaaaatttttgaaccaatcgttatttgtatgagtgataaaaggaatattgaattatttgaaaaagtgggagcaagggttatttttgatgataggttaggagcttttcatgggagtgaagttactggtatgagtttaggtttattttatcataatattaagactatcataccaacttataagtatattaagaagtatattcgtaatattcaacccgacatagttcatttgaattccacttgtttatttattgcagctagagctatcaaaaaatacaatagtcatatcccagttgtttgtcatgtgcgagagcctttattaaacaatatgtttggagacatactaaagattatgaatcgcaaatatgttaatttcttcatagcaatagataaatttgatgccaaaacgattgatgtttctaatgataaattagaagtcatttataattttgtagacatgaatgtctacaactctgacatattatcagacgatttacgcaaagagtttaatattagagagaatagcttgattttcttatctttagctagggttattccacagaatggagttaaagaagcaattgaggcaattagagatcacatagacgaggaggatcagttacattttttctttgtaggagataaccttgaagataactcaaagtatgctgttgaaattagagaagaagctagtatgttagatcatgtccacatcttaccttttcgggacgatgtagtgcagcttatagcaagtgcagatgttatggtagctccatttactcgcccccactttgcaagatctataattgaagctgcttccatgggaaaaccttctattggtactgacattggtggtcctcaagagcttatagttgataaaaaaacgggtttattgtttaacgtaaatgaattccttgaatttatagaatgttgtaaaagaatgaaaaataaagagcttcgtctacagatgggagagaatgccaaggaattcgcaaaagagaactttagtgcagatacaaatgtcaataaaactatccaagtttattataaattattaaaaggaagtatctagaaccagtacgatacggttttatttaataaaattatggttatcggagattaattatggaaagtgtaagaaaaaattatatttatagtttaatttatcaactattgtcaatgggattgccattattaacgactccttatttatctagaatattgggacccgaaaaaataggtgtatattctttcacgtattcaatagcaacgtactttatcttatttgccatgttaggtgttaataattatgggaatcgaagttgtgcagttgtgagagataatagaaaaaagttaagtgaaacattcagtgaaatatacgtattacaatgtatatttgcttgcttaagtattagtgtgtatgttctttacattattattctaagtgaagctaacactgtagtggcttggattcagttaatggtcgttatctctgcgctatttgatgttaactggctctactttggtctagaacgattcaaaattgtagttaatagaaatatagctgtaaagctagttactgttattttaatattcttatttgttaagtcgcctaatgatatttggaaatatactataattatggcttctagttcgttatttagtcaaattgtgatttgggcttttttaaataaacatgtctctttcactcgacctaagataagcaaggttctcctacacgttaagcctaatctaatgctatttatcccagtaatagctgtgagtctatataaaactatggataaaatcatgattggtactttaagtggaatgacacagactggtttatttgataatactgaaaaaatgattaatatgcctttaggaataataactgctttaggaacagtaatgttacctcgaatggcaaatcttgttgcgaaaaataatttagaaaaaacgaagatatatcttaccaattctatgttatttgtcatgtttttaagtattggaatgacatttggtattgcggggattgcagaaacgtttgttcctttgttcttaggtgaaggatttgtagattgtattcaattactagtatatatagctccaacaataattttttattcatgggctaatgttataagaactcagcatttaataccgaataaaaaagatagatcatatatattgtcagtattatctggggctgttataaatttagctgtaaacttcttattaatacctaaatatggcgcactaggtgcagttataggaactgtagcagcagaggctactgtttgtattatgcaaactgtagttgttcgtaaagaaatagaaatatataaattttttatgaatagcttaccatttttagtatttgggtttattatgtatcaagtaatagagatcataggaaaattatccttaggagaaatgcttgttgtttttttacaaattctatcagggactttagtatatgtttttctatcaatattatttttacgttttgtacacaaaaatctattttatggagtttatagtagcttattcagaaagcagatgtaacaatgcttcctctgtttcataatttactatttaatttcaattggacttaaataatagttataaagaaatttttattcaattattttacgaatgacaaactaaataaaaggtgggataaaatgaaaatatcagtagctggaacaggatatgtaggcttagtcacgggggtctgtctcgcagaaaatgatcatgatgttacttgtgtagacatagaaagtcataaggtagcattaatgaaatccggtatttcacctatctatgaaccgggccttgaagagttaatgaacaataatatggatcgtttgcactttacaactgattataaggcagcttataaagatgcagatgttatttttataggtgttgggacgccagaaaaatcggatggttcagctaatctaagctatgtgtatggagtagccgagcaaattgcagctagcattgaaaaagattgtgtggtagtagtgaaatcaacagttccaattggtacaaacgataaaattgagaatttaattaaatctcagttaaaacatgatgtaaaggtgtatgttgcttcaaacccagaatttttatcacagggaacggctgtaaaagatacattgcatacttctcgaatcgtaattggagtagaagaagaagttgctggtgaaagattaaaagaagtatataaaaactttgatgctccaattgtcgtaaccaatagaaaaagtgctgaaatgattaagtatgcatctaatgatttcttagcgttaaaaatatcgtttattaatgaaattgcgaatctgtgtgaaattattggtgcagatattgaagacgtggcgcgtggcatgggacacgatagtcgtattggaaataagtttttaaatgcaggaattggctacggcggatcttgttttcctaaggacactaaagcattgcattggttagcgaatttccatgattatgagttaaaaacagtaaaggctgcgattgatgtaaatgaaaatcaaaagcttaagcttatcaaaaaatcccgtaagtattttgataatttaaaaggattaaatgtagctgtgcttggtctaacattcaagccaggaacggatgacttacgagaagcacctacgcttgtgaatatcccgcttatgttagaagacggagcgaatgttagggcttgggatccaattggtattgataactttaagaaagtgcatccagaagacgtcacgtattgttattcaattgaagaaacactgaaagatgcggatgtttgctttatctttacagaatgggatcaagtaaaacactttgatttagcaaattacagcaaactaatgaaaaatccaattgtcattgatggtaggaactgttacgacttagaaagcgtaaaaagtgcaactatggtgtacgactctattggaagagagacgattcataacttagaggtttcattaattcaatgatgtaagtctcagataaaatcaatttaaaataaactaaacgcaagagctgcaaagaagcaggtctttttttattggagggaaataaatgaaacttgtattgttatcgggtggatctggtaagcgtctatggccgttatcaaatgatacgcgttcgaagcagtttttaaaggtattagaaggacgagatggacagaaagagtcaatggttcagcgcgtctggagtcaaattgaagcggttgggttaaatgagtcaacggttattgcgacgtctaagcttcagcgtgatatgattacaggtcaggttggcaccgatattccgttgattattgaacctgagcgccgcgatacgtttccagcgattgctttagctgcttcatatcttcattccgaagagcaagcatctgaagatgaaatcgttgtggtgttgccagttgacccttatgtggaagacggattttttgaacgggtaaaagatttagaaagtgtgcttcgtgattcaaaagcggatttagcgttaatgggtgttacacctacgtatccttcatctaagtacgggtacatcgtgccggaaggaaaggtacaaggggacagttattttacagtggattgttttacagaaaagccgagtgaagaagcagctgttggattaattaatcagcgtgcgctttggaactgcggcgtttttgcgtttcgtttaggttatttgcttcaaattttacaagagaaaaaacttccacttcaatttgaaacgctacataaagaatatgcaacattgcctaaaattagttttgactatgaagtggtggaaaaggcaagtcatattgtcgcgcttccgtatgatgggtactggaaagatcttggtacatggaatacgttaacggaagaaatggcgacatctcaaattggaaaaggtgtattaacggacgactcagctaatacgcatttagtgaatgaattagatattccggttacggtattaggcgtaaaagatgtagttgttgccgctagtccagatgggatcttagttgcggataaagcatctagtcctaagattaaagaaattattggcgactggaactaccctccaatgtatgaagaacgtctttggggctggtcacgcgtgttagattatgcaaagtatgatgaagaaactgaaatggtgacaaaacgtattcatatttcaaaaggaaagaactcgacgtatcactatcataatttacgtgatgaagtatggacgattgtacgtggagaaggagagcttgcgcttgatgactacattcgccgcgtaaaagcaggggatattattcacttgccggctggcaaaaagcacggaattcatgcgttaaccgaccttgaatttattgaagtacaaacgggaaaagtgatttcaaatgaagatagtattcgccttatttatgactggaatgatgtgatcaagcaattccaatcatcaagaccgcaggtgattttataaaaagtagaagcttagatacagtaaaagcttctatttttttatgtaactaatgaggaggtgcttctggttgaaaacaattgcctattacatttcagactacggatatggccacgcgactagaagcacggccattattcgtcaattattaaagcaaaatgaagaaatagaaattattatttgtcattcatttgcgattgagtttctcagacaatcttttagatatgaacgtcgtgtgaggtttcgagagattttaacggatgtcggctacgtgctaaaagaaaattcactagaaccagacgctgatttgttgaatcgtcaagttgcttcttatgtatcaagctttcatacgaagcttatgtatgagaagcactttatgaaagtagccaacgtttcattcgtgatttcggatatttctccgttagggatcgcaggtgcctatctattaaaattgccttctttaggaatatcaaatttcacttggtttacagcatacgaagggttaattggagagctatcgctggaatttttagaaaaacgttataagcagatgacgtatcagttttcgctagcatgtagtgatgagccacattggggtatcaaagaaaatcaaagctttggtttttattcaagagaaataaacgattctgaagtacagcgtattcgtaaagagattgatcctgaaggtgagagttacatcatctacttcggtctgggtatgaaagtagatattggaacgttgtcggacttgcctatttggcaaagtccaaactgcaagtttatcgtttcatcgaatgttgatgttactcatcccaatgtttataaaattcctcaagatgaaacagaaacgcagcactatgtagcagcagctgatcttggtttaacaaaagcaggctggggcacgattagtgaagcggtttgcgctggtgtgccgctgttgattacaaatcgcagcagcatgaaagaagatcgtcatacgattgattatttagttcgtcatcagctatgcgacttaatagagtggaaagagttagaaggtttagtagtaactccttcgcttattgagacatgcaggcggcagcaaatcaatcgctataaaaatgaagcgatgcatatcgccgaagaaatcaataaaaaaataaacagttagtaaggagttcattcaaaacgatgaaaaaagcacctatttttttagcgcctctatttcaagaacgtatctggggtggaacggagttggagagtcagtacgggtatcgtataccttctgctcagacgggcgagtgctgggcgatttcagctcatccaaacggcccgaatacagttcgagaaggttattatgccggcaaaacgctaggtgagctttgggatgagcatccagagatatttgggcattttaatagtccttgctttccgcttttaacaaaaattttagatgccaatgatgatttatccattcaagtgcatccaggtgatgagtatgcacaggagttcgaaaatggtgagctcgggaaaacagaatgctggtatatcttagactgtaaagaagatgcgacgatgatttttggtcaccgtgcacaaagtaaagaagaatttatgcagttagtaaacgaaggtcactggaatgatttattgcagcgtgtaaaaatcaagcccggtgattttttctatgttccaagcggtacgctgcatgctctttgtgaaggaactctcgttcttgaaacacagcaaagttcagatacaacgtatcgtgtgtatgactataatcgcctcggacaagaaggaaagctgcgagaacttcacttagaaaaagcgattgacgtgacaaccattcctcacactgaatcacatatagagcctattagtattcaagaaaaaggcggcaccatcactacttttttagaagaagattatttttctgtctacaaatgggacatacagtcttcccttgagctagttcaaacgcagcactttacactaggaagcgtcattgaaggaaacggaatgcttttgacagaagaaggagagtttccgctgcaaaaaggagatcattttattttgccaagttcgattgaagcatttactttaacaggccagctcgaagttattgcttctcatccaaatgagaaggttaaacgtatatacgaagctgcaaatgttgctggagctatggcaaaaatctaacggaccgtgtaagaacataataggccatttatcataaatggtataaatattttacatgctatgccgatataaagatagaaagaaaaaataagaactgtcaatatgtcatttaatttacaaaagaatatagtaaaagaatcttttgtcaactataatgaacagtatattgaatttttagaagttactaagttcggaggtcaactatggaagagacaattagtttgcgagagttgtttgcagtgcttcgtaagcgtctttggcttattgtactgattacaattatcgctgcaaccgtaagtggagtgattagcttttttgtgctaacgcctgtgtacgaatcaaagacacaaattttagtcaatcaagcgaaaaatgatcagcaattgtacaatacgcaaaccgttcaaacgaacgtacagctgattaacacgtacaatgatattattaaaagtccggctatcttagataaagtgattaaagagctaaaacttgatacgtccgctcaatccctaagcggtcaaattcaagtaacaaacgcacaggactcgcaggtagcacagattgtcgtacaagatacaagtgcgaagcgtgcgactgatattgcgaatacaacggcttcggttttcaaaaaagaagtgcctaagattatgaatgtggataatgtgagcgtgctgtcaaaagcaacgcttggcgaaagtgcaagtccggttaagcctcagcctcttttaaatattgcgattgcggtcgtagttggtttgatggtaggtatcgggttgtcattcttacttgaatacttagacaacacgttaaagaccgagcaagatattgaaaatattctagatcttcctgtgattggaattgtgacgaacattaaagatgtacctaagccatcaaacgtatcgcgaccagatgtagctgctcgcgtaccgcaaagaggtgagacgtatggctcgtaaaaacaaagctcaaaaaaatgataaaatgctgacgttaaaaagacgtttgcttgctcataacagtccaaaagatccggtagcggaacagtaccgtacaattcgtacaaatattcagttctcaaacgttgatcaagacattaaaacgattgttgtcacatcaagcggtgctgaagaagggaagtccacaacagcttctaatctagcaacggtttacgcacagcaaggtttaaaggtactactaattgatgctgatttacgtaaaccaacgggtcattacacgttccgattagaaaaccatattggtcttacgaatgtgttaactcgtcaatctacgttagcgcaagcggttcaagaatcagaaattcctcatctttctgttttaacaagcggtcctattccgccaaatccatctgaactgttagcatctgctcagatggccgaactgttaaaagaaatgaaagagcagtttgatatgatcatttttgatacgcctccgattttagctgtggctgatgcgcagattttagcgaatcaagtagacggtacgattttagtagtcagcagcggtaaaacagagaaagacgctgcgttaaaatcgaaagagctgttaagcaacgcgcaaggcaagctgcttggggttgtgttaaataaccgaaaagtagaagaaggtaactactattattattatggtaccaattaatcaaagcctcctcgctagcatgtgctagcgaggaggctttttggcgtatttttatagaagaaacgtataagaaattatgactattgttataaaaaaattaaaatgtgagatttttcatggttgaagtatttgtaaggaattagtaaaaatttgctgtttattcatgtgcttacattatagctaaaaagtaggtttttctcgatgaacagcacattttagggcttgtttagtagttcgaatgaaatgaatagatgtattcagactattcttaaatatttacagggcgttggtttgcagatgtttcgacaaaaaaagacatagaaatacatgttataatatgctaacataagtattgcttttattaggtcttaagaaggataggggtgagagtagatgattgacttacattgtcacattttgcctgaagtggatgatggttctgcaagtaacgagatgagtattgaaatggcgaagcgagccgtatcagaaggcatcacggcaattgttgccacgcctcatcatcagaatggcagatatctcaatgaaaaagaagctattttacagagtgttgaacagttaaatagtttattagttcgtgaaggagtgccattaaccattttacctggtcaagaaaaccgtatttacggtgaactcttagacgactataatcaaggcaaaattctcactttaaataatacgggaaaatacttgtttgttgaatttccttcgagccaagtccctcgatatgcggagcggctgctgtttgatattcaatcacagggaatcatccctattattgtccatccagaacgaaacagtcgattgttagaagatcctaatcttctctataactttattaataaaggagcattagctcaagttacagcttctagcttggttggacactttggaaagaaaataacgaaattttctcaccagttaatagacgccaacctcgtgcactttgtttcctcagacgcccataatctccagcatcgctcttttcatatgcaagatgcgattgatgtgattgaaagtgagcatggaagagattattattatatgtttctagaaaacgctcaatgtgttgtcgacggtacacagtgttacaaagaatctccagaaaaaattatgcggaaaaagtttctaggcattttttaatgtatagagggtagaagctattgagcagtatagaaaccatgaaagaatttaatcatttacctaagagtgtgaaaaaggctgtgcggtatatgtaccaagatgcatcttacgatcagctgctgattttaaagaaacatttagcacatgccattcagcagaaagaacaagaactttataaaaaaagagactagtattttctattaaaaatactagtgcttttatacataatttaatgaaactaggtgactacattgcaacagcgtattaaagtaatgacgatttttggaacacgcccagaagccattaaaatggctccccttgtattagaattaaataaacgttcagaagaatttgaatctatcgtgacagtaaccgctcagcaccgtgaaatgctagatcaagtgctgcgtgtgtttgatattacaccggatcacgacttgaacattatgaaagaccgtcaaacgcttatggacgtcacaacacgcggacttcaaggactagatcaagtcatgaaagaagttcagcctgatatcgtacttgttcacggcgatacaacaacaaccttcatcgcaggtcttgcggctttttataatcaaatcaaagtaggtcatgtagaagcgggtcttcgtacatggaataaatattctccgtacccggaagaaatgaaccgccagttaacaggagtattagcggaccttcattttgctcctactacaaaatctgctcataacttattgaaggaaaataaaaaagaagaaacgttgtttattacaggaaacacagcaattgatgcactgaaaacgaccgtgttagaagaatattctcatccggtattagatcgtgtaggcgacgaccgcctaattctgttaactgctcaccgccgtgaaaatcttggtgaaccaatgcgcaatatgttccgcgcgattaaacgaattgtagaggaacatgatgacgtacaagttgtctatcctgtgcatttaaatcctgttgttcgtgaattggcagatgaagtgttaggaaatgatcctcgcattcaattaattgaacctctagaagtagtggacttccataatttcgcttcgcgtgctcatatcattttaacggattcaggcggcgtgcaagaagaggctccttcattaggtgtaccggtattagtgctgcgtgatacaacagaacgtcctgaaggcattgaagctggaacgttgaagcttgcaggtgtagaagaagaaactatttattcacttgctaaagagcttctaacaaatgaagaagaatatgctcgtatgtctaaagcatctaacccgtacggtgatggctttgcttcaaaacgtattgctgatgcgattagcgaatattttagtgctcaaaataagtaattagtagatgggggaagtttaatcatgtcaaaagtaaaaaaagcgattattccagctgcgggattaggtacacgtttcttgccagcaacaaaagcaatgccaaaagaaatgcttccaattgtagacaaaccgactattcagtacatcattgaagaagcaattgaatctggtattgaagatatcattatcgtaacgggtaaaggaaagcgtgcgattgaagatcattttgataatgctcctgaactagaacaaaaccttgtagaaaaagaaaagttcgagcttctagaaaaagtgcgtcaatcagcgaatgtagaaattcactacatccgtcaaaaagagccaaaaggattagggcatgcggtttggtgtgcgcgcaaatttattggagatgagccgtttgctgtgctgctcggagacgacattgttcaagcagaaacaccttgcctgcgccagctgatgaatcagtatgacgaaacattatcttctgtgatcggtgtgcagacggttccagaaaacgaaacgaatcgttatggaattgtagatcctatttcaagcaatggacgccgctaccaagtggatacattcgttgaaaagccagcgctaggaacagcaccttctaatctagctattatgggacgctatatcttcacgcctgaaatcttcaagtttttagaacagcaggaaataggcgcaggcggagagattcaattaacggatgcgattcaaaagcttaacgaaattcagcgcgtatttgcttacgactttgaagggaaacgttacgatgtgggtgaaaagctcggatttattcaaacgtcgctagaatttgctcttcagcatgaagatttacgtgatgatttacttacatttatggatgagctattacagagagaaaacgtaaaagcttaattgatgtttcactagttcgcttggcgagctagtgaaattgtattggagtgaagttgctttgacaaaaagggtacttgtgatttctcaacatttttatcctgaaatcggtagtgcaggaaatcgtataaaaaatatatataaactcttaaaagatgaaaattatgacgtaaatgtactgacgactgagcccacatatccaaataaaaagatctatcatgacgaacagttttgggatgatgagtcaattgatgaagaaaatgatgtaacgcgcattggtgtgaaaaatcgcaagtattctagaagtattatcaatcgtttaatgtattatttagaaattgcttttaaaatgatgctattcattttaaccgaccgaaaacagtacgatgtgattttcgttacatctccgcctatttttattgctgtcgtcgggctgcttgccaaataccgttaccggaggccacttattttagacattcgagatttatggcccgaatcgttaaaaggcgtaggggtattcaattacccagtcgttatttctgtgttcagccgcctagaaaaaattctctatgtgaaagctgatcatattattgtaaacagcgaaggctttattcggtttatgacagagaaatatgctattccgttaaataaaattcattttatgcctaatgctgcaaatcgtaatgaaatttcgatgattgaatctggaagcgacgtatttaaagttatgtatgcaggcaatattggtttagcacaagatgtaacggttctaatggaacttgcaaaagaattaaatgagtatagtattgaattgacagtcatgggatatgggtttaaaaagaaagaatttgtacgttttgccaaagagcataagttaacaaatgttcgatttattaaaccgactactcgtcaagaatgtttacatattatttctgaacaccatattggaattgtgacgttgaacggtaatcgagtatttgaaacggttcttcctggtaaaatcattgattatatgacgtgtggtattcctattgtcgcttcggtttctggctatgctaaagacgtgattgtttcacatgaagctggaattgtatcagatacgaatacagcagatgacatgctaagacatatcttatacttgtatcagaatccttctaaaagaagtgaaatgtctcgtaatagcttaaattatgtgaaaaatcatttcttctgggagaaaaatattgaagtattaatacgtttaattgagaataaaagttctgagcagctgcatatagagcagccagaatcagtggataaggttgaagtgttatgagaaaaaatgtttgtatgtttgtatggaatcattttaccaatgacgcgcgtgtcctgcgcgaatgtacggctttatcagagaatggttatgccgttgatttaatttgtattcacgacccgaacaatccggatttgaaacagtatgaagaagtaaacgaacattttcacgttcatcgcgtaaagcgttatccttcctcgctgctttttatgaaaaaagcgtatcgtgcacttctaaaatataaagtgcttgctctgatcgcttttttactgtggttaggagcagcgtacgtagctccttacgtagtccttcctgttacaattgtagctgctctgttattaaaaacgaagctgcaagtggtctgggtaagaggaagtattatcttaaggatgattttaaaaggcaggaagaagaaatacgagatttatcactcgaatgatttaaatacgttgcctcaaggatttatctgttcaaagcttcgctttaagcgtaagtatcttgtctatgattctcacgaggtgcaaacgagcaggacgggctacgacagcggtgtatacgcaaagatggaatctttctttattaataaaattgactctatgattgtagaaaatcatacgcgtgcaaaatacaatgaagatttatatggtttttatccgaacgtcgtttacaactatccatttcaacccaaaaagcgtgatcaagaaacgattgatttacatgaacgtttagggcttcctgaaaatgaaaagattctgttgtatcaaggtggtattcaaacgggaagaggccttgaaaagcttgttcaagcagcgccgttatttaaagaggggacactagtctttattggagatggacgtattaaaccagagctagagcgtatggtagcggaaatgaagttagaagataaagtgaaattcattccgaaagtaccgctacaagatttaccgaagtatacaaaaagtgcgtacttaggttttcaagtattaaataatgtttgtttcaatcattactcagcttcttcaaataaattatttgaatatatcatgagcgatgtgcctgtggtagcatgtgatttcccggagattaaaaaagtagtagaaggcgagcacataggattgtgtgtagactcgcatgattacgaagagattgctagtgctgtcaatcagttgttaagagatcctatgttacgtacaacgatgagtcataactgtaaaacggctaagtttaaatacaattgggaaaatgagcaaatggagtttttaaaagtctatcaggcaatataaaatagatgaaaataacttctttttttggttcttttattactgttattaaagctagggacaaataagaaaaataaaagcaaaaagacgacattttaaggatgtcgtctttttatgtccgttttagaaaggcaatttaagattctaaaattttttattttagatttaaactttcttttaattcagtagatagttggttacgggtgtcatcagatacggcataatagtagataccgttaatcttttcgccttttccatttatttgcagctgttctgaatttttacgtgcgtctttatagtttgattgaatctgtttcatatcatcaaatgtaaggtttgtttttacattttgaccaatcgcatctaagatcgtaccgtagtttgttaaagattgaacgctagctccttcgtcaataacgccttcaattacttgacgctggcgctgttgacgtccaaagtcaccgcgagggtcttgtttacgcatacgggtgaaagccaatgcttctttaccatctaatttcaaaggtcctttttggaagctgtagccgtcgtaattaaacgcaaggttattatttacagttacgcccccaacagcgtctacaatgtctttaaagctttccatattcacttgaacataatagtctacaggaacatctaagaatttttctaccgtatttacagccatatctacgccaccaaaagcataagcatggttgattttatcttgtgttccttttcctacaatttcagttcgcgtatcacgtggaatacttaccatcttcatagactgtgtctttgggtttaccgtcattaaaatagtagaatctgaacgtcctcggtcaccggcacgctgatctactcctaacagtaaaatagaaataggatcgccattttccaaactcactttatttgaacgtttttcagatacatcacgttttaacggttcatgagtttgtgtgaatgtcttttcaacggaatgccatatgctatatgcatagcctgctacacctagaattaatactaaaataataccaagaataattttgaacgcgcgtttctttttcggtttctttcgcttgcgtctgcgcgcatttgaaggttgtacttgttcttccatatgaagcctctcttccttttccttatgtattgataaaataaatgtcttctatgtaagccattattcttatctttttcatcagaaaatacgtcaaaatgattaaaaaaatgacaaatttaatcaaatttcttcatgtactttaaaattatattataataaaagaaaaaaagaaagatatagtaagggagacaatttatgaaaattttaattaacgtatttgctattctcatctttgtttcatctttagtagcaggaaagatgtattggaatcatcaattagataaacaatttgaaacaaagcctacaaaagtaagcgcagcagaaacagaaaaagatatgcaaaccgagactaagaatctgccagaatcaattgtaaagaaattagagaatgcaaagaaaataggaaatcctgtaaaacttgtaattgtcggatccgctcctgagaaagacgtacagacgtggggaactttactgaaagataaagtagaagatacatatggaacggatttaataaatgtagagttgtatgaatacaaacagatgaatacattacaatttgtgaaaacaaaaacgtatgaagaaattacaaaagcaaagcctgatatcttgctttttgaaccatttttattaaatgataacggcgtagtaggtattaacaatacaattgataacttgcaaattattatgaagcatattgaaagtgaaaataaagacctagttactatttttcaaccatcagctccggtctatcaagctcaaaattaccctaacgatgtaaatgctttagaaacctttgctaaagaaaatggatacgagtttgtaaatcattggagtgcatggccaaattataatgaggaagacattttaaagtatttatctgatgaaaatggtcaaccgaatgaagagggagaaaagatatggtttaaatttctctctgagtattttactaattcataatgaaaaagcacgctaccttataaaaagggtgcgtgcttttattttttaatttgttacaacaggtaaaagtaaagcgttaagctgttctaaaaatctttcatagtatgctggctaagaatgcctgtgcttaaggctccatctatttatgcttttcatctgacatgaacgcttggaggtaagtaatattattaatttatttataaatatactttaattgttaaacaggaagccagaatttggactcaatacggagatctcgaagggaatatccaattaacatttaggtacatttactcattatgatgctctaactattttagttcatttctttttaacattttcttcaagaaaagaatgctacatttcaatacaaaaggaacgtctatcaatcccaaaagagagcatgagcaaaaatagatacttatgctagaagatagaaaaaaagccctgtgatataatataattcatggaatactatccatgatctgaggcatagaaagaggagaaaaaaatgatagatatatataccaatatcttgccaaatgtgaacagtggtcccaaaagtgtagaagaatttttagaaatggcaaatgtattagtgaaacaaggagtaacagaagtcgtagcagcacctctttatgacggaaaagattccagctgtagagaaggtgttgatcttgcaaatgaatggttaagaaaatcttctatttcgttaagcgttttaccaggtcaaaaagtaattgcctctaccaatatgattatatcaaatgaagagtattacacgatgacaataaatgaaaatgaaaaatatatgtttttacacattccacaagacgtggaaattgaagtgttagaaaatattgcatacgagcttcagctaaaaggtattgtaccggttttaaatgagcctgagtgccattcattatttgtagagaatcccgcgcacttgtacaagctcgtaaaaaatggagcagtcgttcagctgtctgcacaaagtgtgctgggaggcaacggcagtaaagctaaaaaagcagcttatcagttcattgatcacggattagcacacgttattgcatcaggtgtaaatcgtgaaaactaccagcagtacggcttgcaaaaagcttattctgccgtttctaaaaaatacggcaacagcaagctttatcattttatggaaaatgctgaggccattgcgagcgggaaagctgtttataaacaagagcctgaacgcatcaaaaaaacaaaatttctaggaatcttttaaatttccctttgtaccctgattaacttctgtttaatcagggtatttgcatacaaagacctatttcaatcccttcttttatcatcattatttggagttattttacaaattatgtttgcgttttcacatagagtgatagtaaaatattgttagttgagtagatgacaggaaagtacgcagttttccggggttcgtggtggtaaatgtcgagaagaatacatagtttcacacgagaaatcgtcgtagaatagagctatacaaaacgcagggagggaaataaagtgattgatattcatacgtacatattgcctaatatcgatagcggacctgaggaagtagacggctttttgaagatggcacgctccttagcggatcaaggcgttcagtccgttgtggctacgccgctttatgacagcgatcaagagtttatgaaacaccatttatttctctatgtgaacgcagctaatgaatggcttacaaattcatatattcctcttcaagtattaccaggtcagcttgtccctttatcgcctcagcttctgcgaaactatgagcgaaatcagcttcttacgcttaatcacacggataaatatttgtttctttcactgcctgaatatgatatctcaccttattttgaaaaaacgctgtatgatcttctcacaaaaggcgttgtgcctattctacgttcaccagaatgtcatccgattttccgagatcaccctgagcgtttgtatgagcttgttaaaaaaggcgtacttgttcagctaagcgccgctagtattctcggtttaaacggaaaaaaagaaagaaaagcggcgtgtacatttattaaataccgcttagcccacgtgattgcctctggcgttcatgctcgcaattaccacgactattcactttcaaaagcgtatgattatatttccgatatgtacggtgcttcagaactttatttttttattgaaaatgcggaagcgattatcgacggtcgtccggtgcatcaattagaccctgagccgatgaaaaaatttagtttatttaaattatttagctgaaaacaagggacttttccataaaaacgggaaagtcccttgttttgtctttctttcattgtggtatggaatagaaacaacgttaaagaaaggaaggctgaatatgataaaaactacagctggcaaagcagctatgtcggtattaaaagaatggaatattgatcacattttcggtatgccaggagattccatcaatcattttatggacaatctgcgcagtgaaaaagatgaaattgaatttattcaagtccgtcacgaggaagtaggcgcactggcggcatcttcttacgctaaaattacaggcaaaatcggtgtgtgtctgtcaattggagggccgggtgcgattcatttattaaacggcttatacgatgcaaaagcagacggtgcaccggtgctagtgctagcgggacaggtgcctcgtgcgaagcttggtaatgaatcgtttcaagaagtgaatttagaacgtgtttttgacgatgtgtcggtgtttaatcaccgagtagattcacctgaatcatttccgcatctgctgcagcaagcgattcgaacggcttatgcgaaaaaaggcgtcgcggtattagttattccagatgatattccgtcttcaacgattaaaattgatgaaaaaacgccaattgcgaatgtatcaaaatccatttctcatagtgacccggaagatgtagctaaagcgcttctagcgattaaatatgcaaaaaaaccggttattttagcaggaacaggtgcaaagcatgcgaagctcgaactagcgcagtttgcggagaaaatcgcagcgccggttatttttacgctgcccgctaaaggaatactgcctgaccgtcacccttataatctaggccagctcgggcagcttgggacgaagcctgcgtatgaagcaatggaagaaaccgatttgctgattatggttggaacttcgtatccataccgtgagtttttaccagatggagccgaagcaatacagcttgattccgatgccacacaaatcggcagacgctatcctgtatcgatcgggttagtcggtgactctaaaacgacgctgtcgcagcttacgcataatttagattatcaagaaaaccgccgtttcttagaagagtgtcaagttaatatggaaaactggtggaagcacgtagaaaaagaagaaaacgaagtgagtacgccaatcaagccgcagcaagtcattcctaagctgcaaaaaatcgttgaggatgatgcgattgtatctgttgatgtcgggaacgttacggtatggatggcaagacatttccgcatgacgaatcaaaaatttgtggtttcaagctggctggcaacgatgggctgcggacttccggcagccattgcaggaaagcttgctcatcctgaaaaacaatcggtagccgtatgcggtgacggaggctttacgatggtcatgcaagattttgtgacggctgtgaagtacaagctgccgattgttgtcgtcgtccttaataacagtgaaatcggcatgattaaatatgaacaagcgcttcaaggtcacttggattaccaaacgcagcttggtgaaatgaactttgcgaagtttgctgaatcatgcggaggaattggctaccgcgttgaaaaatacgaggagctcgaaacagcgtttgaaaaagcagcgcttgcgaatgtcccagtggtaattgatgttgttattgcggatgaaccgccgcttccaggcaaaatttcattcggacaagcagccaattattcaaaacatatcatgaaaaaattctttaaagaacatgagctcgaaatgccgccgcttcgtaaaggactaagcagaatgctttaatcagtgactctccgcataggagagtctttttaggagggatatcatgggagtgtttgaaatcattttacttatttttggcgcggtcatgatgcttgtgattgtagtgccggttattatcgctattattctttggataaaagatgaaaaacaagaagagcattcggttttgagaaactatccgctgctcggtaaaatgcgctatatttctgagaaaatggggcctgaactgcgtcagtatttatttttaaataataacgaaggcaagccgttttctagaaatcaatatgaacaaaccgttaagtcaggtaaatacctcaaccgaatgatggggtttggctcagagcgtgattttaatgaaccgggctattatattcgaaacgcggtgtttccaaagcagcgcgatgaaatgaaagcggataatacgcaaaaaattaaaacaaaagtatataaaatggacgccgataacttatttagccgaagagagcaccgagaagaaaaagaagcggatccattttatttgcgggatgaagatgcgatcgttatagggccttcatgcaaaaatccgtttgttgtaaaaggattaatcggtcaatcagccatgagctttggagcgcttggtgaccacgcgattaccgctttatcactaggattaggacgagcaggcggcacgtggatgaacacgggagaaggcggactgtcaccttatcatttaaaaggaaacgtcgatattatttttcaaattggtccaggactctatggcgttcggacaaaagaaggcgaattttcatgggaagaatttaaaaagaaaagcgaaatgaagcaaatcaaagcgtttgaaatcaagctcgcccaaggagctaaaacgcgaggcggtcatgtagacggttcaaaagtaacggaagaaatcgcagaaatccgcaacttgaagccgggagagtctgtagacagtccaaaccgctttaaagagtttgcatcgtatcctgaaatgttccagtttattgaaaaacttcgagatgtgggcggcaagccagtaggtattaaaatggttgttggaaacacaaatgatcttgaagaaatggcagcgtatatgaaagagacgggaagcggtcctgattttattacaatcgacggagcagaaggcggaaccggcgcatcgtttcaagaattagcggacggagcgggcgtaccgctgttttcaggacttccttttgtggatgaactgcttaaaaagtatggcgttcgtgatgaagtgaagctttttgcatcgggcaagctgttaacggctgataaaattgcgacggctttatcattaggtgccgactgcgttaatattgccagaggctttatgttttctgttggctgtattcaagcggaggtttgtcacaacaataagtgcccagtcggtgtagccacaacagatcctaagcggcaaaaagcgcttattattgaagaaaagtcataccgcgtgtgcaactacgtgctgtcattacgtgaaggattgtttaatttggccgcagcagccggtattgattcgccaacgaagttttcaaaaaaacacgtggtgttcaacaacagcagcggacagttagctgatatttctacaaaagaaaagatgtatgtataaaaaagctgccaatcggcagcttttttattgtcttctttgaagcaaatgcaggcaaaactctaagtctttttgaagatgctcttgcattaaagcttcggctttttcggcattgcgttctttaatagcgttataaatgtcttcgtgttcgtcgattaaaaacgggcggttgtaaaatacgaccgtatgacggaataagtaaatgatcgactgcatgcggtcgatgatattaatcattacctcattgttgcttgcgttcacaataatggcgtggaaacgttcatttgcgctcataatttcttcaaacgagccgtttcttccgatatctacgcattcctttaattcttctaattcgttgtcagacaaaaaagttgcggcagctttagaagctgagccttctaataacattcgtacttcaaacaagttgcgtaagtctttttctgtcggtgacaccactttttttcgaacaatcagtccttcatattctaagcgtctgatggagtcacgaatcggcgttcggctgaatccaagctcgctcgctaatttttcttcgacaatttttgtaccgccttcaagctcaccatttaaaattttatctcgaatcatttcataagaagggtgatgagacgaacgagaaccttgatttcttaacatactctgcttcacctctagcattcgacacgaggaaatctcgtctctttctctctttagtttttatcattttgtacgcgtatacccaaatcatactataacttgtgaaaaggtgggacggaaagtttcgcttttggaaataaatttcattttaaaaaaggctagacaaataaatagaatgcgaatatgatgagtgtatacaaaattatcagaaatgtatacaaaaaatattttaacgtatacattattttttaaaacgtatttgaaaacgtatacaacaaggggaggaaacgaaaatgacaaaacgcgttggatttattggacttggaattatgggaaaaccgatgacgctcaatttattaaaagcaggttttgaggtaacggtttacgatattaataaagcagcagtagaagaagtgaagacagcaggaggatttggagcagaaagccttgctgaagttgcggtgaacagcgacgtgatgatcacgatgcttccggcttcacatcatgtaaaaagcgtagtgcttggagaagaagggttaattcatagcgcaaaaaaaggaagcgttatcattgatatgagctccatttcaccggtagcatcaaaagaaattgccgctgagctcgcacaaaaaggaattcacatgctagacgctccggttagcggcggagagccaaaagcaattgatggtacgcttgcgattatggttggaggaaatgaacatatctttgaaagcgtttcacctattcttcatgcgatgggagcagaagtaacgcttgttggtgacaacggaagcggcgtaacggctaagcttgcaaaccaagtcattgtaaacttaaatatcgcagcgatgtctgaagcacttgtactagcagccaaagcaggcattgacgttgaaaaaatgtatcaagcgattcgcggcggattagcaggaagcgctgtattagatgcaaaagtaccgctgattttagaccgcaactttgtagcaggcggacgcattgatattaacttaaaagatatgacaaacgtgatggaaacggctcatgacattggcgtaccgcttccgctttcaagtcagcttgtggaaattttccatgcgttaaaagtagacggaaaagcaagcgatgatcacggcggaattgtgcagtactatgaaaaattagcaaacgttgaagtgaaaaagaaggtggaagcatgattaaacagcaggaaaaacgtcttgtaagcgatgtgtttaaagacattccaggggtcgatgaggcacttgtacaaaaaatgcttgatgaagagctgctgacgtttaatcaaaaaatcatcgtactggatgatgatccgacgggtgttcaaacggttaacggtatttccgtgtacacagactggagcaaagacagcattaagcaaggatttttagaagaaaactccatgttttttattctaacaaattcacgcggatttaccgcttctgaaacggaaaaagcccatgcggacattgctgctgttattacagaggtggcggctgaagtaaataaagagtttttaattatcagcagaggtgattcgactcttcgcggtcactatccgttagaaacagaagtgttaaagaaaacggttgaacagcactccaatcaagtgcttgacggcgaagtgatctttcctttctttaaagaaggcggacgattcaccattgataacattcactacgtgcaagatgaagactacttagtgccggcaggagaaacggaatttgcaaaagaccgtacgtttggctacagtaaatctcatttaggcgagtgggtagaagaaaagtcagaaggaaaattcaaagcaagtcatacgacgtatatttcgcttggaagcattcgtgcacttgatttagtgacgattaccaatcagttaatggaagtgaaagactttaacaaagtgatcgtgaacgcagtagattatgtggacgtgaaagttgtgacgattgcacttcttcgcgcgatgaagcttggaaagcactttatgtatcgtagcgctgcggctctaacaaaagtgatgggcggcgtgagcgacaaagaccttttaacaaaagaagagctcattaaagaaaagtcgtcaaacggcggattaattatggttggttcgcatgttaaaaaaacaacagagcagttagaagaattaaagaaatgcagcttcattgaatttattgaatttgattgtcatcttgtcttagaacctgaaaagtttgaagcagaagtgaaccgtattatcaatgaagcagagaagcttatttcacaaggtcaaacggtagctgtgtatacaagacgcgagcgcttagatcttggcgaaggcaaaaaagaagaagagcttaaattatcggtaaaaatttcagatgcggttacaagcattgttcgccgcttaaacgttcgtccaaactttatcgtcgcaaaaggcggcattacgtcaagtgatattggcgtaaacggcttatccgtaaagcgtgcgaccgttgctggacaaatcaagccgggcattccggtatgggtaacgggagacgaaagtaagtttccgggcattgcgtacatcattttccctggaaacgtcggagccaaaacaacgcttcgagaaacggttgaattactaagtaaatagaaagaagtgaacgtacgaggtgcgttcactttagaaaatatttgaaagcgtatacattatttggatgtacgtacatgaaaaatggtcacactaaggggatgaacatatgaattcagtattcggattaagtcatgaagcaagtcttttgctgtatgcgattgtatcgattgtcggacttatctttttaattgctaaatttaaaacaaatccgttcgtagcactgattgtcgcggctttgtttatgggtcttatttcaggtatgaagctgcctgatatcgtaacggcgttccaagaaggagtagcgagcgtcttaggatttatcgcgattgttcttggtcttggaacgatgttaggtaaaatgatggcagagtcaggcggagccgagcgtattgcccgcacgttaattaacgtattcggtgaaaagaacgtacactgggcaatgatggttgtagccgttatttgcggtatcccggtctttttccaagttggtgttgtgttattaattccgcttgtgtttgtaattgccaagcatacgggtacgtcacttattaaaattggtttatcattaattgccggtttagccgttgttcacagtttagtgcctccgcatccggcagcgatgctagcggtggatatctttaaagcagatttaggtaaaacaattttgtattcattagttgtggcctttccagctgcagccgtagcaggtccgatttacggatcgttcatttcacgccgtgttcacgtagagccaacgggtgaaattatggagcagttcacagagtcaaagcataaagatcttcctggtttcgggattacgttattcacgattttacttccagtactattaatgcttttagcaacgatcactgggtttgtttatccagaaacaagtacgattcgctacgtaacaaattttattggaagtccaatcgttgcgctgttaatttcgctagtgtttgctttttattcgttcggctttgcaagagggtacaacaaagatgatttattaaaattcacaaacgaatgtcttggacccgttgcttcgatcattttaatcatcggtgcaggcggcggttttaataaaattttaacagcaagcggtgtgggtgacgcgattgcaggatttgctcaagatgcacatctttctcctatcatactagcgtttgtgattgccgggttaattcgtgcagcagttggttcagcaacagtagcaatgacaacagcagcaggtattgtcgcacccattgcagcaacgatgccaaacgtaagtccagagctattggtgctagcaacaggcgcaggttcggtgatgctatcgcacgtaaatgattctggcttctggttaatcaaagaattctttaacatgtcagttgcccaaacgttaaaaacgtggacagtgatggaaacgattctatcatttgcggcgtttgcgatggttcttattttagacatttttatttaaaaaaaagcgctggtttcagcgcttttttctttgatataaaatatgttcaaaatatttaaaataatgagaaaaaaagactagatttttcccgtttcgatagtatagaatagttataaagtagcaaagggggtagatgtatgacaaatgatgaaaaatatcaaattggtttgacgacaaaagcattgattccagtgaacgatcctattcaccgcacaaaggtgctggatgaagcaggagaatacatgctaagcaagacgtgtaagcaattattagaagaagcgtgcattcgagaattaagtacgtttaagggatcgattgccgccgttcgaaaaatgtttccgtacaaacagcttacacctcttgtcattagtcgttcacaagcgattattgcgtttcctacatcttcgcccaatgactacagctgcgcttggattttctcctctcacgttcatacttcacatacgcttgctacagttcattcatcctccatgctaattcacttcaaagacggaacgttcattccagttaagctttcttattatagtttagaaaaaaaactggccagagcagctgttattcgcaattactgtttagaaagtccggttgtcttggcataatgcgttcgatttatcgaataaacttgtcctacatatgaacaatcgtttggactacacatatgaacggaaggaggaagcttatcataagcttcctctttttcttactcttgaagaagcgaggcctttagctttttgcgagctgcttttccccagtttttaacggctcccgtagagactccgtatttataggcaatatctctatacgagtagccttctagcagatgttcgagtacatagattttttctcttcctgttaagtgttcgatatgctgctcaatgatttcactttctagcggaacgggaagagcgggatcttcgtttagtgaaagcaggttttgctcagcaggtgtttcacgttcttcgtataaaatggtgccttttaaatgagaaaggatcgtaccgcgcacggttgtgtaggcataagcggaaaaagagcctttgttttcatcaaatttttgatacgctctccataaaccaatcaacgcaatttgataatattcgtcgtagtctttgtaaatgtgaaactttttaatcatcgatacaattaatggatgaaaagatgaagcgatttgatcaaacgagcttttttgcatgtagcattcctttttcaaaaacgcgtttttgctgtattccgccggtatctctactgtacaaggagaagatcacatgcgcgaatgagggtacattatgttttctttttaagaaacgtgacgtaatttccccagaaacttcacgtttcgctaggaaatatgcgaagtatatacgtatttgtagagattttacgtacgaaaggtcccccattccaaattctactaatctatactatttatatatctattatcgatgtagcaactctaccatcacggaagagcagtgatggtagagttgctagacctatccggatgagcctttgagggtatattcgcaggagctactaattttgagttcttctttatgaaagcaagctgctgagattgtaagaagaacttgtaaaggggagattgaatgaaggcgatggttgggataaatgtggcggcggctgttttgtgcggggcggtgatgtatgcggggacgcagcactggcagaagcaaacggaagcgcaggcaagtgaagtaaaaactgctgttgtacataaagaaaaacagttttctgatgtatctgcttacacaaaaaatcttccggactttattacaaagcaaatccagtcatctatcgcaaataaaaagcctctgactcttgtgcttgccacatccgcgaaggaagcagggtggccacagcagttaaaaaaagagctagcagctacatatggaagtgatgtatttacggttaaaacactttcatatggtaacgggacaactgataagcttttatcctcacatattgccgatcaaattgatcaacttcagccaaacattattctgtttgaagcacctcttaaaaatgattatcagcatcttacgctagatgagacgcttgaaaatacagacaagctgattcatcagcttaaagacttgaaaaaaacccttatgattcagccttcacagccttacatttcacaaacggagtcctatgaagaaggggtagaagcgatcaggggagtatctgaagcaaactgggtatattatatgaatcactcgctcatttggccctttcatttaggagaatatataaataaagacagcggtaatttaacgaaaaaaggaaatgaagtgtggggagagtacgttgtgaattggtttacaggagaataaaaagacaagccctatttaaaaaggaatagggcttgtcttttataattttattagattatgacttttcctcgttttatagtagtagctttttgtatctctacacttataaagcttaaagccaaagatttctaaaggagtccaaagttttttaatgtttacgagtggcattttaattctctgttctgttctttataaaggttatgtattttcattataaagaatataggagtgatagtaaatactataaagaacagtttatctaaaaaattctttataaagaattttttgggattgttatttttgacgtatatacatttagaattgcttggtctgcgatacaggcaataatcaatttacatattgatgaaaagatagatgatagatactaaccaaagtctttagaacaagacgatcaaactatcgctcatttttaataggagtgatttttatcatagctcaggttatttattcttgctaaattaatgttgtgaaaaagatcacaaaataaaatgcaaaggatgatcttaattaagacgtagtgagactacttatttttttttacttgctgttaaagcaatggaatcgcatacataccataactatgttagataacctaacacataagttgaacgattcagaaaattcatatatcttaaatgtatctttaaagatgcatagaaaatatatctttgaaacaagcaggtatagacgccaggggaggaatggaagatgcaaaaaaagaaactcgtattgattggaaatggaatggctggagttcgagcgattgaagaagtattgaaggtttcaaacgaagcgtttgaaattacgattttcggaagcgagccgcatccgaactataatcgtattttactatcaaaagtgctgcaaggagatacgaatgttgaagacattacgctaaacgattggaactggtatcaagaaaacaatattacattatatacgggcgaaacggttactagtatcgattcagtgaaaaaagaagtagcgacaaacagcggcagagtagaatcgtatgatgagttgattttagcaacggggtctcttccttttattcttccgattccagggtctgataaaaaaggagttacggcttttcgagatataaaagacacggatgaaatgctgcaagcatctcagcagtataaaaaagcagcggttattggaggcggactgcttggattagaagcggcgcgcggactgttaaatctaggaatggacgtatctgtcattcatttagctccgtatttaatggaacgtcagcttgatccaacagcgggcaaattgcttcaaaacgaattagaaaaacaaggcatgaagtttttgcttgaaaaacaaacggcggaaatcgtcggcgatgagcgagttgaaggattatcttttaaagacggtacgtttttagaagccgatttagtcgtgatggccgttggaattaagccaaatgttcagcttgcaaaagaagcgggacttaacgtaaaccgaggaattgttgtaaatgactatatgcaaacggatatcccaaacatctacgcggttggagaatgtgcagagcatagaggaatggtatatggactggtagcacctttgtatgagcaaggaaaagcattagcaaaagcgatttgcggggcagaaaaagtgccttatgaaggatcagttttatcaacgcagttaaaagtatcaggtgttgaagtgttttcggcaggcgacttcacggaagatgaagagaaaaaagcgatcaaagtgttcgatgaacaagacggcatttataaaaagcttgttttgcgaggcaatcaaatcgtaggagccgttctttttggagacagcagcgacggaaatcgactgttttcaatgatacaaaagcaagaagacgtatcggatgtcgcaaaagtgtcaattttacagccatctggcggtaacgcgggtgaaagcttagtagcaagcatgagcgccgatgatattatttgcggctgtaacggcgtaacaaaaggtacgattgtggaagctatccaaaaacaaggatgctcatcggttgatgaaatcaaagcttgtacaagtgcctctcgctcttgcggaggatgtaaaccgcttgtagcggaagtgcttcagcatactcttggcgctgactttgacgcggcagctcaaaaagaagcgatttgcggctgtacgactttgtcacgagatgaagttgtcgaagaaattaaagcaaaaggtctttcgcatacgcgtgaagttatgaatgtacttgggtggaataatgaagaaggctgttcgaaatgccgtccggcgctgaattattatttaggtatggtgaatccaaccggatacgttgatgaacgcgaatcacgatttgtgaatgaacgcatgcacgcgaatattcaaaaagacggcacgtattctgttgttcctcgtatgtacggaggcgtcacaaatgcagaagatttacgaaaaattgcagatgttgttgataaatatgaaattcccctcgtaaaagtgacgggtggtcagcgtcttgacttgtttggtgttaaaaaagaagatttgcctagcgtatgggaagagttagatatgccttctggctacgcgtacggtaagtcgctgcgaacggtgaaaacatgcgtcggcgaacagttttgccgttttggaacgcaggattcaatgggcgttggaattgcgcttgagaaaaaatttgaaggactatggacgcctcataaagtgaaaatggctgtatctgcttgtccgagaagctgtgctgagtcaggtattaaagatattggctttattggaattgacggcggctgggaaatttacgtgggcggaaatggaggtacgcatcttcgcggcggagatttgttgtataaagtaaaaacagacgaagaattgatggacatcacaggagcgtatttgcagtattaccgagaaacggctaattatttagaacgtacctctgcatggattgagcgcatgggactttcgcacattcaatcagtgcttgatgacgcccagacgagaagagagctgaatatgcgtatggacgaagcgttatctacgtaccgtgatccttggaaagaaatcgtcgaaagcaaaaagacgaaaaaagagctgttcgaaacagttgtcacatcataatgcaggggggaaataaagatggtgaataaaaacattacaaaagtatgcgtggggtctattcatgattttccggtaagcctgggtaaaacagtgaaagtaaacggaaaagaaattgcggtgtttaagctatcaagcggaaaaatacgagcaattgaaaatcgctgtccgcataaaggcggggtgctaagtgaaggaatcgtgagcggcgactcggtgttctgtccgatgcacgactggaaaatttgcctgcatgacggtaacgtacaagagccagacagcggctgtgtagacacgtacgaagcgtctgttgaaggagatttgctgtatcttttaattgaagaataagtaacgaggcgcgttgattttcaacgcgccacaaaaattcaaggggacatactcaaaggagcgaagcagaagatgagacaaggaaaagtgtacattgtaggagccggaccaggagatccagatttgctaacgataaaagcagcaaaatgtttagaaaaagcagacgttattttatatgaccgactagtgaaccctgttcttcttcagtatgcaaaagaaggagccgaactcgtctactgcgggaaaaagcctggtgatcactgcgtttctcaagatgatattcatgatttgcttgtatactacgcaagaaaaggaaacaccgtcgtgcggttaaaaggcggagatccgtttattttcggaagaggcggggaagaagcagaagtgctcgttcaaaacggaatttcgtttgaagtcgttccgggtattacagcgggcatcgcggcacctgcttatgctggaattcctgtgacgcatcgtgagctgagccgttcatttgccgttgtgacgggacactgtttaagcggcaagccggaaagtattcgctgggagcatttagcaaaaggagttgatacgcttgcgatttatatgggcgttaaaaacttgccgtatatttgccgtcagcttttagacgcgggaaaaagcgcggatacgccggtcgctcttattgaacaaggcacgacggtttatcagcgcacggttacaggcacgcttggcacaatcgtagacacggctgcggagcagcaagtcagcaaccccgcgatgattgtgattggtgaagtggtgaagcaagcttctgctctttcctggtttttggaaaaaacagaagaaaaagtatgcgtctaagacgaataaaaggaggaaacgcttttgcttaagaattcactgcagtcaatgaatgagttagcccgtgaaaaaacgaagcttgtgaatgatcatttgccgagttatttgctgttagctgtgctagcgggtgcttacgtaggactgggcgttatattagctctatcggtaggagcgcctttagcttctgcttctttaccggtcgtttctcttgtcatgggattatcttttgctgttgctctcctgcttgtcgtatttgcaggagctgaattgtttacgggaaatcatatggtttatacagtcagtacgctatcgggagtcaccacatggaaagatacgttcaaaaactggacgtggtgttttatcggaaatgcgataggtgcgtttggactttgtttgttaattaccggaaccggtttgtttaaaggaattgaaccgaaccatttacttatgacgctggcagctaaaaaaatgaatttgccggtcagtgaattattttttcgcggcattctttgcaactggcttgtttgtcttgcgatttggacggctgcgcgcactaaaagcgatgcggcaaagatcatgctcattttttggatgctgtttgcatttgttgcatcaggatacgagcacagcgtggcaaatatgacgtttcttggcctagctttattgcttccgcatcctgatgcgatttcggctgctggactatttcataatttaattcctgttacgctcggaaacatcgtagggggaggattgtttgtaggaagcatttactggttcgtgaacgctagacagctaaaagaagctaaaaagcagccggctgctctctcagctgacttggattctgttaaactgtctaaatagcaaaaaaccgctctttgtaccatatagtctgcttttaaagctaacataacggtattttagagcggttttcttctatataatataaactgcttaaagcgtattcacatctatacgtatcgaacaagcagtatcgttcttcattttatagaaacaggaagtctgtgagaattgaatccggacagattctgttgaaatgaatgtgtgagggtgcagatatcatcgaagaggcagagggcatcttagaattttaatgttgtttggcattttatgctctttttgagcatccttaaagcagttgtacattgctttgctgcctaaatgattagcggagtgaatcgtaattcgatcggcatataaatgatgctttaccataaaatgcacgagcattaatccattccgtgtcttgctgagtaaatcgtgatcgagcgacaaatgttcaacatcgaatgaccttagcagatcaatacattcgtcaatcgtttcggctaaaacatgaccgtcagggcacttgcgatagtcgtctagaaaaacattgattttcatgactgattctcccttccttgccttgtatttagtgtaacatacataatgtcatatacctacctaagtctattcgacacgttttaagctattccttcttaaataggggtaaaaacacgaatttttatcattatttgcatattcatggcgaataaacaggaaataaggaaagagatgtcgaacgaaaaatgaatagataaacagtttaaactggaaattaactttttttattctgtgatctttatttaagaaggtcatttaaatcccagatttgacaagggatggaagggggctaacccataaaagattgtgagaaaaaaacgataatttacgatttttttaaaataaattggaaatttctctttacgaaaaagatgtttgggacgtataatttgatttaaggattttttggaacatagtatgacaatatgacaaaaaagaaaagtaaggtgaatagaatgggtaagttatttagtatcggtgaagtattaattgatatgattccagctcaaaaaggtcttcaattgaaagaagtggaatcgtttacgcgtgtgccaggcggagcgccggcaaacgttgcagcagttgttgctacatacggtaatgagtcagcgcttattacaaaagttggggaagatgcgtttggagactttctagtagatacgcttcgtgaagtaggagtaggtactgatatggtctatcgtacggaagaagcaaatacagctttagctttcgtttctctgcgcgaagacggagaaagagatttcagcttctatcgtaatccttcagcagatttattgctaactgaagacgaaattaacccagattggtttgcaagcaacgatgttcttcacttctgttcggttgatttagttgaaagtcctatgaaatacgctcatatgaaagcgattaaaagcatgaaagaaaaaggcggcgttatcagctttgatccaaatgtacgtcttccgctttggaaagaccatgagctatgccgtcaaacaattttagaatttatcccacaagcgcacattgtcaaaatttcagacgacgagctatcgtttatcacaggaattgaagatgaacagcaagcgattcagtctctatttacaggtgacgttcaagtagttgtattcacaaaaggtgcagaaggtgcaacgctttatacaaaacaagcagtctatgaatcaaacggttacaaagtagcagttgttgatacaacaggtgcaggagatgcatttattggcggattcctttatcagctattaagccgcgatgtgtcacaagaaaacttaaccgctattcttgactctgaccacgatgctattttacgttttgcaaatgcaagcggtgccttaacgacaactggaaaaggtgcgatcagctcaattccagccaaagaagtagtagagcaattttgtaagcctgtagctaactaaaatgaaaaggctttatctcttcttatttgcaatcagcagaggcgtccgtttctgctgattgcaaatcacataagagggagaagcgagctgcagagcaagaagaaaaaatttttttctgtttttaaaaaataatcaaaaaaatttctagctaaataataaatgttcgtgttagtatagtacgagcagcaagaaatagcagttttaccaccatttatgaaaacgttatatatttatcgatgtagaacatttaataggactaaagagcgatcctatcaaattttctagacctaagcggttgctgccccccttgtggggtaggcatcatccgcataagtggacctttgggggaatattcgagggagtatgagtgcttggtccttagcccttaatgaaagaaaagcagcaggtcgttacatacgatgtacatagattagaaataggaaagtaggttaagagaaagatggatattttgctaggtgttcttccttccgttgcgtggggaagcatgattttagttagtatgaagatgggcggtggaccttacagtcaaacgcttggaacaattattggagctttgattctttcatttgttcagtttatgattgtgcagccggtgttaacgccaacgcttgttattgtcggaattgtttcaggtttgttctggtcagtaggtcaaagcaatcagtttaaaagtgttccataccttggtgtttcaaagtcaatgccgatttcaacaggtatgcaattagtatcaacagctctttttggtgttattgtatttaaagaatggtcaacgcttcaaacgattgtgcttggatctattgcgattcttttaatactagcaggagttgtgctttcttcattagacggtaaaaaagaaggagcacaaggggctccaggacaaacgaaaaaaggagttatcactcttatcatttcaagtcttggattcttagtttacgtagttatcgcacgtattttcaacgtagacgcatgggcagcactattcccgcaagcaatcggtatgttaattggcggcttaatcattacatacaaacataagccatttaacaaatatacgattcgtaatattttaccaggtctaatttgggcatctggaaacatgttcttattcttatctcaatcaagactaggcgtagcaacaagcttttcattatcgcaaatgggtatcgttatttcaatttttggcggtattgtcttcttgggagaaaagaaaacaaagcgtcaattattctatgtatctcttgcgagtgtactgattatttcaggcggtatctgtatcggcctcgcaaaagctcacgtttaatttatccttaatttatcgatgtagaaaaaacctcatggctaaagtgcagccatgaggttttttctagaactatggttttgaggccaccccttgcgggatggcctcaaaaccgtagttaaggtcaaaaccgtagtcaaaaccaaacctatagtgctcttctgaatttcaaagctgtatgttcctgttgggggttctcgttcttaaggctgattgtttttcattctttgttaggaagctgtttggtgtgagatggcttatagtagtagaaaaggatggagggaaggctatgattaagagtatttatgagacgcatgtgcatgtgcggagtttggaggattcgattgaattttatagacgtcttgggctgacgtttgttcataaaattgaagagaggcgctgtgcttttttctttgttggggaacaaaagcagatgcttggactttgggaaaccgatgaaaaagagttgaaaagtagtcattttgcttttggaattgaagcagcagatattcatgaagcgttaacgtggctgcgttcaaaaggcattgaaccggaagagacgtcgtttggaaagccccaaacagagccgattgttcatacgtggatgccagcggcttgcgtttattttaatgaccctgacggcaaccgcttggagttgattacgcttttgaatgataagcccgttatatctaaggattttccttatttaagtgaatggaataaagaaaccgggacgaaattattttagctcaagtgaaaaacgcaccattgatcaacgtgtttgattagcggtgcgttttttttgttatggttaacgtaggtttgatctgttttgttccttctagcagttgattggagtcatttcgttatgtctccatctttttatgtatcataaacgtagaattgacatatttataaacatataatatatttgtttataaattaataaacaaaatagaaaggtgtctatttatatggtaaacgatttgttttgggaatcatcttttgaagagatgaagaaagggtacggggaaagcgaagatcactaccactgcttactgtgcggtgaaaacattgaaaaaggcattatttatccggtggaaggtgttttttatgaagcaaaacgctatatgaagcttcatgtggaacagcagcacgggtctgtattccatcatttaatagggctagataaagaggtaacgggtctttctgatcatcaaaaaaatttagtgaagttttttaaggaaggaaaaagtgacagcgatattcaaaaagaaatgggaattggcagttcatcgaccattcgaaaccaccgctttacgttaaagaaaaaagagcgtcaggccaaagtgtttttaacgctgatggaactgttgaacgacggagaagaagagaagaagctaccggcatccactgcagcgcctagaagaagtcagcgctacagcatcagtgatgaagagcgtgaaaaaattttagcgaagaactttccgcaaggtttaaacggacctcttcgcacctttcacttgcaagagaaacaccgtcttgttgttcttgaagaattaagcggacattttgagtttggcagcacgtataccgaaaaagaagtgaacgataggttaacacctttttatgacgactacgccgtgctgcgacgctatttaattgaatacggtttcttagagcgcagcgcagacggaagcagctactggagaaaaggagagacagagatgagtatggactcaaaagactataaaaaacaaatgaagcagctagcgaaagaagtaaaaacagaaggcggcgtgtatcaaattaaaaaccttcacaacgataagatttacattggctctacgcctaacatcaaaacgttaaacggcgtaaagttcacgttaaagacgaatactcatcaaaataaagagcttcaaaacgagtggaatacgtacggggcggatgctttttcaattgagatgctggaaacgattaaaagagaagaagaaaaagcactttcaaaaaaggatttgctgaaactggaagcgaaatggttagagaagctgcagccttacggcgaaaaaggctatcattcgccgaaagctgatacaaaggagaaataggtgtgaagaatcaagatgttaaaagtgaagtagtggaatcagaaaaatccgtcagtaagctgatgcttgtgtttttgattccgctcatgttaagtaacgccatgcagtcagttgggcagctggcgggaagtattattgtcggaagagcgcttggagttgatgcgttagccgctatttctgctttttttcctctgttttttctgctcgtgtcgttttcgattggaattggttcaggaagttccattttaatcgggcaagcgtacggggcacaaaacgaaaaacgagtcaaagaaattatcggtaccacgctcacgtttacatttctagtcggaattgtgcttgctgttttgggaagcatatttgctccggatattcttcggattatgggaacgccggctaatattattgacgtaacggttcactacgcgcgcattttgtttgtggcgattcctgttttgtttttatactttgtttatacgacgtttatgcgcggaaccggagactctaaaacgcctttttactttttagttgtgagtacggtcttaaacatcatttttcttccgattttaatttttggatggatcggagtgccaaagcttggagtgtacggcgctgcgtatgcaacggtgttttcaaccgtattaacgttcattattatgattatctatttacgcaagaaaaatcatccgttgaagtttgactcatctatttcattaaaaatggacggaacgcttttaaagctgcttatgcgtttagggattccagcgagtatcaatatgattttagtttctctttctgaaattgcggttattacgtttgtgaacggatttggctcagacgctacagcagcgtacggagcggtgaaccaagtggcaagctatgtacaaatgccggcaatcagcttaggaattgcggtttctatttttgcggcgcagtcgattggcgccaataaatttgagcgtttaaaagaagttattcgctctggaattatgctgaattacgttattggcagcgtattgattttacttatttatctcttttccaatcaaattttagctctgtttttaacaagtcagcatacgctccgtattgccgaagagctgttagtgatcacgctttggagctatttgattttcggtcatgcgcaaattattaccgccacgatgcgagcaagcggtacggtgctttggcctacggtatttagtattatggctatttggtgtgtagaagtgcccgtagcctacgtgctgtcgcagtttacgtctcttgaaattaaagggatttggattgggtatccagcggcgtttgtggttagcttaatcctgcagtacagctattatcaatttgtatggaagaaaaagaaaattgaacgccttgtcggatgaaaaacgagtggaaacgctcgttttttatttttcctaattaaaacacccttagctaaaagttttaataggatagtgcatataactttttgatgaaaagagggtatgacactatgagtaaatctggatttgtgccggataattcaaatattaaaaaaagctcaggaacgcctaatctgtcagtgaactataagcaaaacgtcctgttcaaacgaaatgaccaaaatatagcgtatcagctaacctcaactcagctgcctgccatgctcggaggtgcgtttgttgatttatatatgacgaaagggcatatgagagaaccgcactggcatccaaacgcgtgggaattagatgtcgtcgtttcaggtgaagtgcaggtgtctgtcttagaccctgatacaagcagcatgcacaattaccgaataaaagaaggcgaagttgtttttataccgatgggctggtggcattggattgaaccgctatcggaagaagcgcatctgcatctcttttttaacaatgatcaatttgagtctacagaaggatccgacgtgctgcgcttaacgcctcctgttgtgtttcaaaaagcgtatggagtaagtgcaagcgaagtagcagaagccattgctccgattacggatacggttatcattgggccgcctgagagtaagcaatactataagatgaaacaagcaaatgagtataaaagtgatggaaatgatgaaagaattatcgtcaaaattaacgagaaaatacttgcttctgaagaggggcaagatgtgtaaggatttttttaaatgagtttaacggaaattctgctttacctctatatctttacttccgagccaaataaattggctcaagaaatcaagtaaacaaacctatgacttatcataggtaagaaacatcacgatcatggtatctttgattaatctactatatgactaggtttgactatttgtataatacacaaacctagtttatttaaccagaattatcagtagttaatttggttaaaattctataaaaatagcgttttgagggaattttccaacaccaaaaattctctgtgaaaggtatacgcttaggtagatttgcatgtttttaagttagtagataatttgtccaagagcttgtcaaaaccctgcatatactagtattggcaattaaatatctagtaggagtggagtatagtatatgggattaacacatctaacagggcgagtaatctttaagggtgatcctggttataaagaggcagttaagaactggaacccttatgttgatgtctttcctcttgtctttgtttttgcacaaaattcatatgatattagtaatgctattaaatgggctcgtgagaataatatacccttgcgcgtcagaagtggtcgtcatgctctcgataagaacctttcagtagtaaatggagggcttgttattgatgtgagcgacatgaataaagttcacttagataaaaaaaatgcaattgccactgttcaaactggagtgcacgtaggcccgcttgtaaaaggtttggctcgagaaggttttatggcgccgtttggggatagcccaactgttggaatcggaggaattacgatgggaggaggatttggcgtactctcacggtcgattggccttataagcgataaccttgtcggcttgaaaatggtagatgcacatggcaggattattgaagcaaataaattttgcaatgaagatttattttgggcatctagaggcggtggaggcggtaactttggatataatactcaatacgcgtttcaagttcgtcgtgcacctaaaaccgcaaccgttttcaacattatttggccatgggaacagctagaagcggtatttaaaacgtggcagaattgggccccgtttgtagactcacgactaggatgcatcctcgagattttcagcaaagtaaatggtctgtgtcatgcagaaggtatctttttgggttcaaaaaaggagctaattcaattattagagcctttaacaaatacaggtactccatcacaaatcgtgatagaaacattaccttatccagatgctatagatttcttagaccctgacgaaccaatccctggcagatcggatcaaagcgttaaattttcctcatcatggggacttgatttatggccggaagagcccatttcaattatgaagaaattcttggaagaagctcccggtacagaatccaacttcttttttataaattggggcggtgcgatcagtaaagtaccaagccacaaaacagcctttttctggcgcagccccttgttttatactgaatggactgctagttgggaaaagaaatcacaagaagctgctagccttgcatcagttgaaaaagtacgtcagatgatgaagccttatgtaacaggttcatatgttaatgttcctgaccaaaatattgaaaatttcggaaaagcctattatggatcaaacttttcaaggcttcgagaggtaaaggcgaaatatgatccggaaaatttatttcgttttccgcaaagcataccgccatcatcatgctgaagtttttattcattaaataagatctcttagggttggaactgacctttgattggtaagccgcatctatcaatcgaaggtcagtttttatatagaaaaatcacattctctataagttagcaaaaatcaaaaaggatttaattatgcatctacatataactcatacgcaataatcgcaggaatcaatctcctgcggttataaaaacagctccttgcgttctaagtgcttatacagccgcgttgtgacttgtttttgattccattcgttttgcggaaactgctgcttgtctacgtgagcaacggccggtttgtaggttttttgaatccgtttgatatcattaaagggtgcattggtttcaatgtgatcagcgagcgtaaatacaagagaatgcagctttgcaacattgggaatcgtagctgcttggctgaaaatggcttttgctacagacagctgcctttcatgggcagtaaagatgtcttgctcattacgctcctttaaataaacaagcgcttcttttccggtaaggcgaattgatccttttggaaaaacaatgttgctgtgttcaaaagcacgtttgtttgtgacgataatgccgcctaatttatttacagcatcgacgactgactgctgatccattttgacataataatcaacaggaagctttgcatacgtttcgacgttctttacgacagcattcatatttcctcgatgataaatggttcgcagtgtttcattgccgagctgagttgaccctggcaagtgggtcatttttattgattcatgctgtttattaacagtcatatatacaaatgacgtattttgatggttctcttgaattaaaagcagggaaaacggttgccctttttttaaattgacgtgtgttttgttcccatgctcaagcggtacatacgtttgatcaacggcagctttcaccgtatgatagcctgcaaatgtgatgctgacaaaactgacgagtaaaaatagtacgagaccgccaatccactctttttttgctttgctgctcatcgtctcacctttttctatcgaagtcgttcgtagtattgccatcttaaaaggggagtaaaacaaatgagcgctatttttattgcttatcttgctttttcttggcgtaggttttgagctctgtaattaaaatcgcttgttcttccgcatcgttaaatgcttcaatgccataaaggtattcggtgtgccgtttttctttccacacgcaaagtccggtaatatgaatgggtttttcatttaaataaaagctgatttttagctgaatttgatggttgaaaataggtaaatcaagcggcgtaattattttgattccttttggtgaaaggtcgataacggacaaaggacgtggcttagaatcgatttctttgttgtcgtatttagcaatggaaaacgttccaacaatgggagtctcaaataaaaagcgaaacggttcttcacgtttaaaatgcatgtatcatcagtccttttcgtaatctaagtttgttaagtaagtattcgatgaaagtccaaaaattcctacacgtttttccccatcacacatataatgtttatcggtgtagaaaatctaccatggccggtctttggccatggtagattttctagacctaatcgtaggcgatcccccttggctgatcgtctacgattaggtgaacctttgcgggaggattcaagctttattagttatcgattgccgattataactgcttttatagtatcggaagttttgtttgaaactttaaaaggtgaggaaaaggttttgaaaaaagcgctacgctagagttggattgtatgttaaaattaaactttgtgaagtagctgtattacaagtcagcgttccttcaactaattaggaggtgagatgaatgggcactgatgaccccatttcgatgaaggttactgcaaaacaagataggggcaacaaaggtgtatgtgttcctctcatttcaacgaaggaaaatactccttaatgcctcaatgatgtgaggtgaaaaatcaatgattaaaacatacttatatgatgatgaaacaaaagaaatggtaacgaatcttgatttaggagacgtgcatgagaaattgcgcaatcctgataatttgctgtggattgatttgtatgatgtccacggacaagagcttgctcaaattgctaaattattcgattttcacccattggcgattgaagactgcttacacgacagtcctcgcgctaaaatggatgattacgaagactataaatttttcgtttttcacgcgcttcgctataacgaagaaagtgatgacgagattacgacgcttgagttaaatgcctttgtcggatcaaattacgtagtaacaattcacaaacataaaatgggctggcttcgcaaaatggatgctgtgtgctcacgttatccaaagtttatgaaccgcggcgccgactttttattatatgctttgattgatggcatcacggacgaatacttcccgattttagaccgaatcgacatgcgtattgatgaattagaagatgaaatctacaacaaagaagtgcgcggagtgacagaagagttcttggcgttaaaaagaacgattatcttaatccgtcgcgttattctgcctcagcgccgaattttcttaacggttaatggaaagtggaaattcgatatacgagaagaaaatgttcctttctacattgatttgcttgaccacttagagcgtattgtagattctgctgaaacgtttagagacctcgtaaacagtgcgcttgatacgtattattctattaccaatgcaacttcatctgaaaagctgaatgtcttaacgctgatttcaacaattatgcttccgctaacgttcgtaaccggattttttggaatgaacgtaccgattccatatcagaattcccactgggctactgctgttattatcgttatgttaattgtgttaacgtggggaatgtggaaatactttaaaaacaaacagctgttataacaaaaaggcacttggccataagccaagcgccttttttctttattttgtcaccgtttttgttgttgctttactcgtattgttcgctttgtcttttgcggttacgcttaagactgttttttctttttgctttttaatttttactgagtactgtcctttgctgttagcagcagcagagccgatgctttttttgttgactgttaccgttacggtagcatttgcttctgctttacctgttacagccgtgctttttgttgtgacagcatttacgcttggtgcagcaggaggagttttatcgctcacttttacagtcgcagctttacttgtgttgttggctgcgtctgctgctgttacgctgattgctgtacctgctttttgtttttttatcgtaatgctgtactgaccttttgcattggcttttgctttgccgatttctttgttgttcactttcgctacaacagatgcatttgcttctgctgttcctttaatagctgtatccgcatcgttgactggatttactttaggtgcatttggagcaataacgtcacgcaccgttacttttacttcttcactttcttgttgttggctgtttgtagccgtgatgtacaagactgtgttttctttttgttttggaatttttactttgaacgcgccttttgcatcagcctttgctgaagcaatcactttcttagcgctgtttttaacatttaccgtaaaattcgctttagacgttcctgttacatactcatctttattcgtcaccgcttttaccgctggtttggcaggtactttttgaacaactgcacgaatgctcgtacttgcttttccgtttgtgacaactacttgtaaaacggtatcagctttttgagctggaatgttcacagagaacgtattttttgcatcagctttaactgtgccaagtgtttttgaaccgttcattactttaacagttgaaccgctttgagctttacctgtaataattttttgcgtgctgacaaatggatttacctgcgcttgcagctgctgtgcacttacagcgctgtacgcatttaaacgtccccatcctgatacgtaatcatagcctggagcagggggttctgctggactttcttcgtcatcgtatacaggagcatctttttcatcaaatttaatatctttagctgtatcggttaggcgtttttcaacgtcttttggctttaagcctgggttttgggatagcaataatcccgcaacggctgccacgtgaggtgttgccatggatgttccgcttaaataagtgacgtttccgtctggaacaagacttggaatatcagagccaggagctgtaatatctaatccttttccatagtttgagtagtcagatacgatatctaaacggtttgatgcgcctactgaaatcgcataggcagatgaagcagggtaagaaagctcttccataccgtcgtttccacttgcagctacaaccgttacgttatggtcgtatgcatattttaatgaatattcaagcacgcggctgtaagatccgccaaggcttaagttaatgacttttgcaccgtgatcaaccgcgtatttaataccgtacgcaatttgttctgtatctccgctaccagatgcgtctagaattttaaccggtaaaattttcgcatgagaattaatgccggccattgaatagttattgtttgcagaggctgcgataatacctgctacgtgagttccgtgtccattgtcatcagttgcatttgacgaacgatccacgtagttatagcctgtttttgtatccaccacgccttttaaatcagctagtgatgaatcgacacccgtatcggcaacggcaataaccgtatcttttaacttttgaccatttagtaatttttcaagtgattcgtattgaatatcggcatgctgagtaccgtcatttttacccgtgttatttaatgaccattgatacggatattgtgaatccattgaaagagcgtggtactcttgaaccggctcgataaattcagtttcaggaagtgcctgaatttgttttgccgtcattttaccttgagcagatgacgtgctgaagctttttccattgctgtcatctaattgaataacaaacatattatcaaaagaagcagctgattgttttaatggattaatagattcaatgcttgctgattttgactgtgcttttgttttaaatgatttagcatttgcaccatcttttaatttaacaatatagcgagtttcagcttttgttgaaacgctgtttgcgctgactaacttagctcttactaatacagacgatacgtttaagtccgttacgtcttttaatttggtctgtgctgctactttttctaaatctttctttaaagcagccggaacagatttgtatgcgatgctgtataaatcattgattgctttttgatcagcacttgtaatcatgtacgtgcttgatgcgccgtttttcgctacatctgtaaatagaccttttagctgaactaaatctttgtatacttgttcgcgcatcgatttatcaataatcattttagagctgataaacggagcggctttgtaataaagagaagaaaggtcttttccgcttgctgtttttgaaagcacagcgtcacgaatcgtacgcaaatcttttaaaataccttttccgttttctttttggcttgtacttaattcagccgggcattcttctgcctccatttgagaagggggaagtgaagcgccttcatagctgattgtgtaaggaacttctgtttttaattccggctcaggttccgaaggagtttgtccaccttcttcggtatcatcttcaacaataagatctccatctccgtaatactcaacctttacataataagggccagtccaagcgattggaaaatctagctgagcaggttcatctttgtaagagtatcccatataacggtcaaatgccacgttgtttttggcattttcaagactagaataaaccgtgatatttacttcatcatcactttgaagcttaattcggtagtgtgaaaactttgctacatcttgcttagaaggattaattttgtaccaatgtgcttgttctggttctgtaaatgttccttttgctgctttaccaatgcttaatgttttttcattagcaggaggattgcctgccgcttgtgttttgagtaagcctaattggctaaaacacaaggtgaacattaaagcaaaagcaataaaacgataaattgacccttttttcatgttaaacctccaaaaaaatatagtaaaaaacaggaattacatacctattaaaccataaagtttaaaaatttgtaaataattactgttgcttattttagtattttgtcaagttattaatctcgcataagaaatggtgagataagtcctagttgcaaaaagtagaaaaaattggaataataaagattgagcctgtttataagaggcgagagtacgctgaaaagggaagaagggaatgagaattatttttcaaagcagaatttactggagaaaatctgatcggtttctttttacctgtgtttataaagaggaaatcgggctatataaataaagattggaaaaattttcagtctaattaagttcatttgtagcatataatacgagctggatttcttttataataaacaaaagcaaagaaagagcaaatggtgaaaaggagtgaaagaagttgtcaaatgtgatgcaacgacaggaaaaacgaatgaagtttgatgccgaacagcttgcaccccttgatattgatgaagagataaagaagttgctaacagaaaaaggattgcccaaagaagcttcaccatttctagagttcgtttcatccaaaggaaagctaacaacgctatgcgaaacatttgagttatcatctcgctatcaacaatactggtttttaggaacaacaggcgctggagatccaatttgtcttcaccaccaaaacggttctgttgtactgctcgatacgtccaacgatgactgcgagcgctttattaatacaacttttccacagtttttagcatgcttagatgtgtttgaagaactagtagaagaaacgattcaagcgaacggagaatctgcatacttagagcgacacattcctgctgaggtgcttcagcgatgcaaaaaacgtatgaatgaaattgatgaagcttgtttagccccttattctttttggttcaaagaactttctttttaatatagtagaaaaatagacatggccattttggtcatgtctatttagttgtggctgcagggctagtaatatagatagaataaataaaaatgatagtatataatggatataaattccttttttggaggggaggagggtgtaaatgatttctttatttggattaatgggtgccttctttgtgctgctgtttggtgcgtcgtacttcttctatagaaggaactcgcccgtgcagtacgggatttcacttagcagcatgctaataagcatatttctatttctatatagcatgtttggagttggcggctttgaaggaatgggtcttggtgctttagcggctgctttgtttgtagcatcggttttgagcttgttcgtcagcgttctttttaatatcataaatagacacgggaaaggtgctgtgtgaaatgggagaaataacctttagagaagcagtgcgggaagatttaaatcaaattgttggaatgcttgctgatgatatgcttggaagcaaacgagagcgctacgaatcaccgcttccagcctgttatgttcaagcatttcaggcaattgatgcggatccaaacaatgaactgattgtcgcatgtaaagatagtaaagtaataggggttcaacaaataacctttacaccccaccttgcacgacaaggcgggtggagagccacgattgaaggagttcgaacagcttcatcacagcgcggaaaaggggttggatatcagctgattacatgggcgattgaacgagcgaaagaacgtaattgtcagttagtacaactaaccacggataaagagcggtcagaggcattgcgtttttatcaaaagcttggattcacagcttctcatgaaggattaaagctccatttgtaattcgctgttaatgggtgtagccctgtggtaagaattttttgattaaagtaaattttttagtttagttcaattgaaacgtggtatacaaatagtacagagccgatagaaatttttctaaggctactgtgaaaggtaaatacttagcttcatgaagggactggtttagttttggaatacttaacagcaacttcagcaaacgtattacctcacatgaaaagcagatattctgatctcacaatgggtactctcgttatgaaccgatatacgtagcgaaagggcctcacaagggcaaatgaacatgaaataattagcatgatatgaagggaagaagctgcatcagttttgatgcagcttcttttttgtgagatgcggcaggaaatcgtatacaaaattttggcggaaatttatatgtaaaatctataaattaagtatagtaaattattttaccatcacggatgaaatcatacatacaacaattatgaaagaagctaaaaggcagctggaacattaccgcaaaaaaatcttcaaatgaatgcactacgaaatttcttataacttatttgacacctaaggtataaaagagtataattatgttaaacatagtaattatgtcggataagtaggttatggtgctgtgaacaagacttctactgataaagaggagatctagtccaaatcgtacagtccgactttgatgagatgctttcaagcatcttttttttgtgcaaaaaaacagccgcaggggctgttatagggcagtaattcttcctttgtaagcatcaatcaaccgctggttatgttcatctgaaccttccatgttaccgcttaaaaagacaggaggcgtaatgccacggctgagcagtttttggatggctttagataggacatcgtttaggatagcgcctccgattacagtagaaccagaagcgaaagaaatgtcttgctgatgaagaagaacgtctccttttggaatgtgattattaataacaagatccacgacatcatgaaggtattttccgcttttatgccgcgaagcccggctcgtggcataagaaggagaggtaagcccgatcacaaaggcgcctttttcttttgcaattaaggccacatcaatgggaacaggatttacgcctgacgtagaaatgacaatcataatatcgcctggtacgatatcttctttttccataaaggtggaagcatagtcgtttttacgctctagctgtgaagagcgcgaagctcctttatgaagcatcagttcttctacaaaaataggatgaatcggtgcaagccctccggaacggtaaaacacttcttccgttaaaatatgagaatgaccgcacccaaataaatgaatgaggtgatgagaagctagttgctgtgagattttctcggctgcggattccattgcctgctgttcatgcgcctccactttagcaagcagttttgttagttcctgtagatataaactagacataaaaaaactccttagttaagatcgtgtcatgttaatcgtaaacttatagcggtctgctcggtacgaagacttcaccacttcaagcggcgtgccgtcttgcaaatacgtatttcgttgaatcaatagaacgggtgaatatgagctgattctaagatgcttcacttcggtttcagaagctaaaatggattctaacgtttggttggcttcgccaattttcagcccgagctcttcttcaatatagcggtaaagagagtcgttaacaatggattctgttaatcctttgactaagttagcagatacatacacgctttcaagcgccattggtacgtcgtcagctaaacgaatacgcttgatttcataaacaggtgcatgaagagaaatgtgcagctgctcggcaattttttctgaagccgcaataatttcaaagctcagcagcttactgcttggtaccattccacgcgctttcatatcttctgtaaaactcgttaatccaacgagctgctgctccagttttttttcagatacaaaggtgccgcggcctttttgacggtataaataaccgtcgtttactaaattgttaatcgcttggcgaacggtcattctgctgatttcaaatcgttctgcaaactctcgttcagaaggaagcgaatcatttggttttaactctccgttttcaatttgtcttttcaactgttcttcaatttgataataaatcggaagaggtgagcttttatcaatcacttaagttctctcctttatgtaaacctcctcatctaaaaaagacgaggaggctataaattaaaccgtagtcgatactttagctaaagcttcttggtccgcaataattgtaacacagtgatgcttctttaaaatagaagcagggaagtcttctgtgatttctccgttaagcagctgatacatcgcttctgctttggcttccccggagataagtagtaaaatttctttacttttcataatcgattcaattcccatcgtaatagcctgagtaggcacttcgtcaagagaattaaagtagcgcgcattggcttttcgcgttgactcttctaacgtcacaatatgagtaggagagttgaatgacgtaccaggttcgttaaagccaatatgtccgttttggccgattccaagaatctgaaggtcaatccctccgtgattttgaatcatttcatcgtagcggcggcattcttcttcaggcgtatcagctaggccgttaggaacgtgcgtgttgcttacgtcaatatcaatatgattaaataacgcatctgccatatagtagtgatagctgtttggatcttgcggcttcataccgacatattcatctaagttaaaggaagtaacgtgtttgtaagacgtgccgtgctctttatgatcttgaattaaacgatcatataatcctttcggcgtgcctcccgttgcaagtcccagattcatatttggcttttcatgaagtttgctaatcagcatatcagctgcttttgcactcatttcactgtaatttttcacttggatgatattcattgttagtcctccttttgaaagctcaatgtgcctcggcaaaatgtcatttcaacatctaagttttcatttaacaccacgatatccgcatcttttccaattttaaggcttccttttgtatcaaacagattaagctgttttgctgggttttcagcggtcatttttacgatgtcttctaatgagcagttcgtaaagctcatcgtgtttttaatcgcatcgttcatctttaagatgcttcccgctaacgttccatctgcaagggtagccgttgtgtcatttacgtgaacaggctgtccgcctaaatcatacgtaccgttttttagccatttggcacgaagagaatccgtgataagaatcatgcgttcacttgtaatttgatcgtacgcaagcttgaccatttcaggtcggcagtggatgccgtctgtaatgagctctacaaataattcatctctcaaataagcggcgcctaatacacccggctctctatggtgaaggccgcgcatgccgttatataaatgtgtaatatgagaagctcctgcttcgatggcttcaccaacttgatcatatgtgctgtcagaatggccaatagaagcgacgacgtttgtttcttttaaataagaagtaagcgctaagccgtttggcagctcgggagctaacgtaacaagtttaatatgtcctccggctgctttttgccactcttgaaacagtgctacattcggatcttgaatgtgagtaggcggctgtgcacccgcacgttttggtgaaataaacggaccttctaagtgaataccaactacttcagcatctgcatctgtttgttcttctatataagcccccgcattgcgaagcgctttttcaaccgctttattcgactgcgtcatagtggttgctaaaaagcttgttgtcccttcttttgggagcgtacgtgccattgtttttaatgcttctgctgtaccgtccatcgcatcggcattgttaacgccatgaatatgcacatcaatggcaccaggaatcactttataggaaggagaaagctcaatcacatggtctttcggctgacgtacgtattgatggatctctccgatttcagtaattttcttgttcgttagtttaatatacccgttttttaatgtctgattttcactataaacggttacattataaataatgatggatgaatgtgtatccatacatacactcctttgctcgttgtattgatttaagtgtaacgctttttggaatagttgtctagaccagttgtttcttttttgtgaactagaaagttttgtaagggcttttaacattgatatagagaggtttttaaaaagaaaattggtatagacaactatatattttatgtgctagtatgagtccatgcagtaaaaccgccgttatttcagctgatgatgtaatcataggccggggatgaatgcggtaacttgtcatccgataaatattgttacgaaaatccttgctcgtaacatcgggttaaatacgttatacaaaggggatagaaacatgctgaattttttacaacgtattggtaaatcgcttatgctgccaatcgcagtattacctgctgcggcattgcttcttcgtttgggtcaaaaggacttattagatattccatttatggctcaagccggagatgcgatttttgcgaatttagcactactgtttgcactcggaattgctgtagggctttcaaaagatggaagcggcgcagcagcacttgccggagtcgttggttattttgtattaacaaaaggaactgtagctattgataaagatattaacatgggtgtactcggcgggattgtctcaggggtaacggccggtttactatacaatcgtttctcagcgattaagctgcccgagtggcttggcttctttgcaggaaagcggtttgtgccgattattacgtcagtcgttatgcttgcgcttgcaggaatctttggcgttatctggccccccattcaagatcaaattaacaacttaggaacgtggattacaggagcaggagcgcttggggcaggtatatacggatttttaaaccgtctattaattccaattgggctgcatcacgtgttaaacagcttagtgtggtttgtattcggagactatcacggcgtaacgggagacttgaatcgcttctttaaaggagatccaacggcaggaaccttcatgtctggattcttcccggttatgatgtttggtttaccggcagctgcgcttgcgatggttgcagcagctaaaaaagaaaagcgcaaacaagtcagcggtatgttaattgggcttgcggttacttcttttttaacaggaattacggaaccaattgaatttttatttatgttcgtagcaccgctactatacgttattcatgccgttttaacaggaatatcgatggctttagccgttgctcttggcattcacgctggatttggattttcagcaggggccattgatttcttcttaaactacggaatttcacaaaaaccgctgctgttagcgggaattggaattgtatatgcagtgatttactttatcattttctacacgctgattaaagcgttaaatttaaaaacaccgggacgtgaagatgatgaagaagtagacacatcaaacgaaacggttgtagcaacaggcgataaatatgtggatatggcatcgtattttattgaagatctaggcggaaaagaaaacttaaccgtgattgataactgtgcgactcgtcttcgcttacaagtagctgatgccggcaatattaatgaagctgccttaaagcgccacggagcgagaggaatcatgaagctcagcaaaacaaatgttcaagtcattgtcggaacagaagtagagtttgttgcagacgcaatgaatcaattagttaaatacggcacggcgtcaaccggtgcacctgttgaacaacaggctgttcaagcagacgcacacacagagtttgttttaccgtttgaaggcgttgtaaagccgcttagtgaagtggaagatcaagtgttttcacaaaaaatgatgggcgacggctttgcgattgaaccaattgaaggaacgctcgtatcaccgattaacggtgaagtcatgaccgtgttcccaacaaaacatgcgattggcttaaaaacagcagaaggaattgaaatcctcattcacgttggattagataccgtgaatttaaaaggcgaaggattcgaagcgcttgttcgagaaggtgacagcgttcaacaagggacgccgcttttacaagtgaatttagactatgttaaaaagcatgcaccgtctattgtgacaccggttgtatttaccaacttgccagcggataaagaagtgaagctgttaaaaacaggctaccaaaagcaaggcacaaaagacgttattacattttaataaaaaggctggaacaaatgtgttttagaaaaagatccgaatgattcatcgttcggatctttttcttttcttcataattgcaagaattttatgttaaaatttagtgtgtttgatacagctagtgcagagcagagaggaagtagaacaaatgaaaacagaaacggcattattcaaagtaaaggtgacagcatgtttattataggagcattagtaaatggactagcgattgttgtaggaacattaatgggcaagcttgctcaccgcattcctgaaaaagtaagcgtgacggtgatgcaagtgatggggttatccgttatcacgcttggtttacaaatgggttttaaaagtcatcagtttttaattgtgattttgagcttagccattggagcagttattggtgagttcattgatttagatgaaaagctaaaccttctaggcaatataattgaacgaaaatttcaatcacagcaaaatgacaagcaaacattcagtatgtcacagggctttgtgacaggaacgctaatttttgttattggagcaatggcaatcgtaggagcattagacagcggaatacgcggcgatcacagcgtattgtttacaaaagcggtgatggatgggtttatctcattattattaacgactacgcttggaataggcgtcattttctcagctgtgcccgtgtttctatacgaaggcattattgcgttatttgccacgcaaattaatgcggttgtgccgcaagatttaatgaatagtatcattgccgaagtcacaggagtagggggcgtattaattttagcaattgggattaatttattagaaattattaaaattaaagttgcgaatttattgccttcgattttaattgcggttgtgattgtagttgtacagcatacatattttttatgaagaaaaagcttgtgaatagtattcgcaagctttttgtatctatgagcaaaagttaagggaatagcaggtataaagcgatgcgtggataatggtatagaatgaaccaaaagcaaaaaggaggattaaaaatgccgagtcctgttttcaataaaatgaatacggtatttatccacgtatctcatttaaaaacttcggtaaaatggtatagcgagttattgaatcaagaatacaagatcagcgaagttaagaacccagtttataatcttaacattgatggagaaacaggattaacgctagacgcaggtcctgaaggaaaagaaaaacaaatagcggttagtctccatccaatttttaattttcatactgaagatattaaagaagcgtatgaatttgttaaagggctgcactatacgattgattctccgattacttcttttgaagatttttcgttttttaccataaaagatccggatggacatgtggtcatgatttgtacaggttaagtcgttagctccaaaagtttaaggtatagtatactaagaagaaaaccctaatgagatgaagtaaggagaaatactgcttatgaaagacaatcaacagattacagctcttattgctgcacaagtggaaaagttagcacgtcaatttggctatgactttttatctgaaaaacaagggaatcaaacgctttgtcaaattcttcagcgagatgaagacggatctattttggcaacgccgcttagttttcatttacatatgaatgaagacaaagggacgggagatattatttactaccatcaacaaggagaatttaagcgtcagcaagtgaatgtatatgaagaaaacagccttgtgaacgtgttgttatttatccaagagcgcttaaaggtcaatcgatagaagcgagtttcctaacatatgcaagaaaaaagcagggagttagttccctgctttttttctatgaattgatatagcgcaatcctacgcggttattaaaaatttggttgtgatttttgaagataaaagcacctgctgcgtgatcaatcaccagctcgttgtcgtacacttcttccatgtcatcatcaacaataaattctaagtcttcaaccgttacaactttttcataggattgaaggctgcgctttgagatgatcttcatttcataaattgtattaacaatatcgcagcttcctcgatcaaaagaaagctgaatcatttgattttgttctacgttccgcaacgcttcttttgcagaaggagtgacgcgtatattcataatgatatcctcctttttctatcctcaaattaaattgtgtaaaatgtatttagcaatactttactcgatttttatatcaccggcaagaaaaaagctttcttatattatttccctttcgaaccagaacaaaacgctgcttttttatcatcttttcataaaggcgtacatagatatcacctgtatatgatgaaaggaaaaagaatcgactatagaaaaagtgccgattcgtaattcttaggtgtaaatattttaatagttattgagatagttttgaataattggttttattttcaatatattgggtacttaagtagagtactttgcacacggtattgcaccgaaagacatcggtttatcgaactaattattgtcttattttgtcgaagtagtagaatttatggaaaccattccttatcatgtacaaagtgactaacaaaatacataggaggttctggtgtagatgagtgagaaagatcaaaacagaacaacagacgaaacagcggcttcgctagaaacagcgcccgctcccaaaaaagcaccggctaaatggattatcattttagcagctttaattgtgattattggaggagcaattacatttgctacggtatttaaaaaatctcctaagcaattatacttaatttctgaagtaaatacgtatcaaaaagcagctgatgaattagaaacaaagtacagtgaaacgatggcttatcaggaaaaagcaatgaagcagccttctactacaaatgctactatcaaaggcggctttaacatggattcactttcctatgatccaagctttaaaatgattcaagatcttattagtaaagcggaaattaaaattaaagcggaacaagatccgaaaaaaagtgaaggatacggttcactggctcttaatatcggcggttcaaaagcgcttgacctagaaggctttcaaacaaaagaaagaataggttttaaagccccgattcttgcaaatgaatatttctatttaaacttagacgaatatggacaggtagcgcgtaagttcgatccttcttattcaggtcctgaaacgcttgatattaacacaagcaacgtgagtttagaagacttaaagttaacggaaaaagaaaagacctacattgcaaaagagtacggaacgttcatttatgatgagctagacagcgattattttaccaaagaaaaaaatgtggattataaaacaaatggcaaaacgcttcagttaacaagcgtgacgcttaacatgtctgataaagaaacaaaacaatttatggataagcttattgcgaaggtagcaaaagatgacaagcttcataccatctatgcaaatcatgtatctaagctgtttaaatcttcggcagcaacgaatccagaattaaaagatatggcggatccaaaagaattgaaaaaatcagtaaaagaaagtcttcaagacttccaaaaagaagcaaaagatacgacttaccctggcggtgttaaatcaactgtgtacgttcaagatgatgttgtggtagctcgcgatatgaacatgggcgtaaaaaatgcttctaacgataaaggcaaacttaacgtagtaactaaaaatattccgtatgaagataacaaaacggctaagcagtttaaagcagttttagcggatagcactaccgatgatgcgtttacgtttgatatgaaaaataacgtaacaacggaaagtgaaaaacgaaaagaaaacatgtctattcatttgttaacaaaagattcaaaagatgaagacacgaatatgacgtttaaaatgaattcagtaattaacggtaaaaccgatgcaaaacaaacggctgaccgtactttctctttagacttaggtgatcaagaagatctagtagtaaacggagaagtaaagcaaaatcaagcaataagtgcttcaaaaggaaaagcagattattcgtttgatattcgtacaaaaataggaccaaaagcagatccggcaaacgttacgttaaaaatcgactctgcttctcaattaaaaaaatcagccactattccagagcttgatgcgtctaatgcaacaaatgtaaaagatgtaacgcctgaagatatgctgtcgattcaagaaaatttcgctaaaaatgttcaaggtctcatgatgaatatgggaaccgctggttactaaaaggtgcaaagcagatgaagatatatttctctttgactctttttacatgtaaagctctattgaaaaatataaaatctctcatactgctaataatgatccctgctctgtttttacttggagcagggatcattattagtcagaccatgcaaggtgaggagagagtaaatcggttcgccgtggcaattgtggataaagatgacactgcacaaacgaagtacgtcatcgaacagttgactgaaggtaagcttcgcaagatcatgaagcctctttacacgaatgaacagaaagctaaacagctgctgcagcaaaataaagtggcagccattgtaacgctgccaaaaggttttagtcacgatattgctcatggaaaaaatcagcctttatacgtcattggaaatagcaataagccgcttcagtcacagctgtttcgctatgtgatggaaagtgcagccgactacacgtcagctgctcaaagcggtattaatacggttgatgcctttttagaaaaagaaaatgtttccgatgaaaatagacgcgcagagtttaagaagagcttggtgacgtttgggcttcacgtgttagatagaggaagtttatttgatgaacaaatagaaacgagtttctttcagcaggatatgaagcaatattatgtcctgtctttggctgctttgctgcttatgatttggagctacggcggatggctgcttgctagtgaaacgcagacttctcccgtgctggctcgaatgaaaacaagaggtgtatcgtttgtccacatttatttagcgcagctgacggctctgtatgttcttttgctaccggtctctgtcgttttgtttggaagtctccttagaggactaaaactgcctgtaaccggtacgtacggagagctttttttaggggtaagcggaagcttgtttgcttttttatgtttgtttttactgcttcgggttctttttttatcacaaaaagcttatcaaataaccggtttgctgtttattttgctgagtgcgatgttaagtggacatgttgtgccggtcgtctatttaccggactgggcgagtgtttttcagaaatggtcactcaacacccgcgtcttggagctgttattttatgaatttgatggatataacacaaacgaagcttttctttaccttaagcctattctcattacagcagcgggaagttttgttcttgctgctggctacgtgatgacgctgcaaaggcagtggagaaaatgatgagtgaaaaaataaagcagctgctgaagcgccctatgcttgttatcatgattttctttttacctttaataggaacgattattagcagctcgtttttagcaaaagtacaaagtgattcaaaaatacctgttgctcttgtcgatcaagatcatagcaaaatgtctaaacaagtggtggatcgactacagaaaacaacagaaattcagtttatttccctaaatgaagaacaagcgagaaagcagctggccaaaaataaaattgacagcatttttatgtttcctaacggatttcaacaagaagtagaagcggggaattatcaaggagtcattgatttgctcacgctgccttcttcagttgccacagaagcggttcgagaagtcgtggcgagtgaagtgacaaggttaacgacaaatgttaaagcggcaaatgaagtgcgttttttatatagagtttataacattcatgcaggaccggatttatggaaagaagcgtatcgttataccgataaccagtggaagccaaagccgctgatgacaattgattacgaggcgcaaggaacgaagcatacgaagcaagggagcgctcaagtgaccggatacgtgccgctatggggattctttacgcttttactttgctgcctcacatcagattggatgattagagagaggaagcatcttttcaaacgaatgaaaacgatgcaaaaagggctttatggttatattcgaagcgtcagcgctgcttatgctgtgctatacgtgtttcaagctctcataagctttgctctatttaaatggctgtatggagtagagtcttacagtgtgctgctgtatatgtgtatctatgtgattgtgtgcgttgcttttagcacgtggcttgcaagtgaaagtcagcgagttggatcttattatatgatcagcgttgtcatggtcacaggactcagtataataggagggagctttttcccagtaggagagctttctgcaacgattgaaagaataagtcagtggcttccgcagcatctgcttctgtatcagcatgcactgccgcttacgttcatttggaaagagatagctgtttccattgcatgtatatgtttgtgcgcgtttaaaatagtgtggaatgtgaggagcatcaaatgattgaaattaacaatgttagcaaaacatacggaaaaaaacggtcgttagcaaatgttacgctgactgtagaaagtggagaagtcattggtcttttaggaccaaacggcgctggtaagtcgacgcttctgtctattttgtctaccattacggctccttcaagcgggaatgtcacgattggaggcttatcgcttaagaaaaatcaaaaagcgattcgagaagtcattggctatgttccacaggacatagcgctgtgggaagagcttagcgtaaaagaaaacatgaaaatgtggagcaaaatgacttcacgctctctgtcgaatgaacagcttcagtctctttgctcagctgtacagctcgaaggtagatggaaggaaaaagtgaaaaatttatcagggggcatgaagcgaaagctaaacatagccgtttcacttattcatgaaccgtccgttttgttaatggacgagccgacggtcggaattgatttgcagtccaagcttgagatcattcgttatattaaacagctggcggcaaaaggaaagacgattatctatattacccatgatttgaatgaaatattagatgtgtgtcatcggtttgcggtcttgaaggaaggaaagctggaatttgtcggcacgatggaccaagcgaaggaaaagactggggaagaggcagaagagaacgttgtgtataagctgctgcatgattaagataaagtaatgataaaaaagagccgcttcatgaagaagcggctctttctattatgcttgtgtaacttcttgttctggtgaatgactttcaggctgcacgcgttcttcttcaggaagggcacgtacttctacttctttcatttggtgaccgtccatttcttttgcaataaactcgtatccgaaaagtttgaacgattcgctttcctggatatcgatattttgcattaacatccagccgccaattgtatcgatatcgtcgttttcaatttcgatatgaaggacttcgttaacttcttcaagcagtacttttgagttaaagacaaagtgctgatcgctgattttttgaacaagcggcttttcatctgtatcaaactcatctcgaatttctccaacgatttcttctaaaatatcttcaacggtaacgataccagccgtaccgccgtactcatcaatcaacacagccatatgcgtacgtttcttttgcatcgagcgcaataggtcttgaatcgctacggtttcaattacttgaataataggattcatataaagcttcacgctttgcttttttaacgcatcgttaattacgacatcgtttagaatctctttgacgttgactaagccgataatgttatctttgtctccgtcaacggtaacagggtaacgagtgtagcgatcttctacagcaagctttaagaaatcttcaatgctgtcgtcttcagaaacagctgaaatttctgttcttggtaccatgatttcgcgagcaacacggttatcgaattcgaaaatgttgttcacgtacttatattcagactggttaatttccccgcctttaaaactttctgataaaataatgcgcagctcttcttcactgtgcgcaagttcatgctctgaagctggctttaatccaaacattccagttaataaacgggcagaaccatttagtaaccaaatgaaggggaacataattttatagaataaaattaacggacgagcaaacaataacgtaacggtttcagctttttgaatcgcaaatgtttttggcgctaattcaccaacgactacgtgaacaaacgttacaagcgcaaatgcgataatgaatgaaagaatatgtgttaaagatgcagcaacgcccattttttcaaacaggggttctacaatcttcgcaacagtcggttctcctaaccaaccgagtcctaaagcagtaatcgtaataccaagctgacacgcagataaatattcatctaagtgtgtcgtcacggttttaaccgcattcgctcctttttttccttcagcaacaagttgatctacccgtgaactacgaagcttcacaattgcaaactctgaagcaacgaaaaaagcagtgagtacaattaaaatcgcaaaaataattaagttaatggttatcaatgaatatacttactttataatgctataaagtaagtaaacacctcctgtaaataataaatttacgacagtagcagcagtaaagagtgcaaaagagtgacgctttctggtgaaagccgattcatcattacttttcgatcttcttcattaagcttttccataagcggtgcaacttcttttaaactgtcgtttagtacgtaaaatttggatgctaattcgtctttggagtggctattctcggattgctctatagaaaatagagaagaaatttcttcaagagaacggccttcgctttttaatttttcaattaaataaagacgtttcagcgcttcttcgttataaaagcgatagttagaagcagagcgttctgcttttaacaaaccaatgttggtataatagtcaaccgtgcgtttcgttacatgtgccatctctgcaagttcgccaattttgtatgtcgcaaccccatcagaataccacctcctttaactatgtcaaccatcacgtgatggtttttatctgtgtaactatttatcttttatcctatcgtaattaagtatacgcgcgtaagatcaaaaagtttcatttttttattagcattcagtatatctcaaaataaggtagtttgacaaagattttataaaaaaactcgcttatattaagcgagttttttagtaggatgacgtacgataatgtgcatgcgttcatacacatattgaatacgttcagtataatctatgaactcagggctcattggagatagctgatcagcaatacggtgcataatagcagcttcttcttttaacgaatctaaattttgagttcggtcaattcttgctttaaatgttaacgaaatcatgttattcacctcgttgttatgttacttgttatgaggagctatgtccgtgacttttatcactctcgtcaaaggtgataacgtaattatttgatgtttgccggcattttgtgtaggatgattagaaaagggtttttatgggagaatgaaatgaatttaaaacgaatgcaccacgtagccattataggaagtaattatgaacgttcaaaagctttttatgtaaatgtgttaggatgcaagattatagaagaaacatatagaaaagaaagagattcatataagctagatttagaagtagctcctggctatcaaattgagttgttctcgtttccaaatccgccacggcgtccttcaagacctgaagcgtgcggcttacgccatttagcttttgcggttgaaagcgtagaggattccaagcgtgaactagagcagcaagggattgatgtggaatctattagggtagatgaactaacgggaaaaaaattcacattttttgctgatccggatgggttaccgctagagctttatgaagagaaagagggggaataaggagtatgtgcaattatttatttgtatacggaacgcttcttgaaggagaaggtaatcacggattgctgcatcatgcgcgccctattgccaagcaggcaaaaacgaaagggaaattatatgacacaaagcaaggctatcctatgcttgatatcgacagtgaacatattgtgtacggagaagtatatgaagtgaccgatcagcttatgtggaaggctcttgatgaattagaagggtacattcatgaaggtcataaagacaatgaatatgataaagttgtgcaaacggttgaaacggaccaaggtgaatttgaagccgttgtgtatgtggcaagcgatcgttcgctgctgcacgaatttatcccgagcggaaactggcgcgtgtggaaagaagatttattagaaggtatgctgtattttgcttacggttcatgtatggataacgatcgttttattaagcacggggtggatcagcatttccaagactgtctcggcagagctgttttcaaaggctatacgcttcgatataaccacgttattcatgacggaggacgtgcagacatggttgaagaaggcggagtcgttgaaggcaaactgtaccgcgtgccgcctgaagcaattacgtacctgtatggcagagaaggcgtagataataacggctatcgccctgctattatttctgtcgagcatgaaggtaagatggtggatcatgttcttactttttttgtgttaaataaagaaaaagaagtcgcacctccggatcattattcgactgaaattattcgaggggcaacaggtgtactcagcgaagaatatgttcagaagctaatagaacaagtccatgcgctaaaaaatagcgatgttgtaaataactaatataaaaagaagcagggacaaaagtagtttagttgaagaaagctccgaacgagtaatcgttcggagctttttattgttatggtgaacgtagagttaatctatttagctgcttctagctgttgattgaattgattttgttatgtgttgaattagctaaaggaaacagagaattctgtttgaaatacaccgtcttttgataaacggttgatgcctaatttttctttgaaatttccgttgtgatcatgcgtatctgcaattccaaaccaaggttcgatgcaaagaaaaggagcgattgtatgattttctgcatcatactttgaccaaataccgacatacgggaaatcattaaactgaacgttaatttgattttcattaaccggcgatttaatcgtaattccgtcaatatgactaaaaattagcgcatcatttgcaaataaatctgcgcttagcggcagctgatgcaaattttctgcagctcctttttcatgaataagagcgtcttttaatataaattccttcggcgtagttttagaaggctctatttctaaaaagtaatcagaaatctgctcgttttcacgtaacggaatacgaaaagcagggtgggctccaattgaaaaatacatatcgtctttatcttcgttcactactttccactgaaaagttaatcggttattttccagacggtagctgatttcaactgaacattcaaacggatatacgtctttaaagcggccgtttgtagcaaattgcagccgtgccgtttcgtttgtttgttcgatcacgctgaaagcagaatcacgtaaaaaaccgtgctgtggcaaagagtattcgcgctgatcaacggtatactgatcattttttaatcggcctacgattggaaacaatacgggggatactcgtccccaataagcggggtctccgctccacatgaactgcaggtctttttctttatgaaatacttctacaacttccgctcctttttcttgaatacttactttcattttactattttctagtacaatcattacaacatctcccaaatcattcttgtacgctcgagcagcctcaaacgtactggctttgcctatattatacccttcttggcaaaaaaggtattaatttccctatttttgttcaaattaatatagaaaaaggagggttcaaatatgaatcatgcaacattattgctcattaaatttgcagcggcacttattgcgtttggtataggccttgatttgttttttgatgcaaccatcggagacattatttcctttagcttgctaacgacagttgtgacatatttagtagtggatcgaattgtactgcctcgagtgggcaaccgtgatgccattattgttgaatttgttctaacctatatgagcgtatggatttttggaacattgttattagacagctacgttcaaattgcttggggaagtattatttctgcagctattattacatttgccgaggtttttgttcaccgctacttattcaaccatattgaaacgaaacatacagtgagaacgcgtcccgcttttaagcgaaaactagcgtatgacacagaatttgcagaagaacagcatgtagaaaacaaggaaaatccaaaataaaaagaaagctcacttttgagctttcttttttatgtgttaatgcataagagtcatttcctttaaaggccagtatttcatattgacttctcctatgatcgaagaaatcggagtgaggccaaaatgtctgccatctcggctaatgcgtctgttgtcacctagcactaatacgtatccatcgggtatcgtgccgtcttgagacagttcgtacgtggaaaaattttcagtaaatcgctcgtaagcgggtactttggataaatatttatgaagatgcggttcttttttgactttgttatttatatacagaacatcatctttgtattcgaccgtttctcctggtaagccgacgatgcgctttactagaaaatcactgctatagggagcttgcaaaacgacaatgtcaaagcgctccagcttgctgtgtttgttaataataattcgattgccttcgtgcaaaataggcttcatagaatcgccttttacagtgtagggctgaaaccaatagtgctgaacgacaacagaaagcaaaacagtgccgaggatgacgcttgtgtatgtaagaatttcacgctttagttttttattgaccataatggatgaacaccttcttaacggtaagactgtcaatttaagtttttcatagagatataacagtgttgattgtaccattcagaactaaagttttccatatctatatctatctgtttatgcgtgtatgccaaaaatataaaaatatgcatgagggaacaaaaaatgaaaagagccgttattctagggaataacggctcttctttattataagtgagcgcgctcagttcgagtagctggttgatttggttcttcttccacaacaggctcaacaggcttatgctgcttgatttcttcttccagctcagcaattcgcttgtttttctgcttcacttgtcctcttagttgaacaatttttacaaagctcaatgaagcagcaacaactcctccaaacacggccgttgttaagataattaaaataagaggccatttttgtgaaccaaatacatagttaaattgtacaggatcgttgttaattacagctaaaacagcaatgataagagcaaatataagtcctaaaataaaaaagctctgtcctttcataagctgcacttcctttctttacatggtcattacaacttttatagcgtaaccactcatcttaagtgtttgctatcttgcttataggtatacgtatccacatttaaacaaaatcaaacattttcttgattatatgtatctttcttttaaaacacaatatatcgattggtgtagcaactttgacatgtccaaagacctggtatgtcgaatttttggaataaagagctcgcgtatcctttttgattaagcagattaagcggggggggggagggacttccatttaaatcatatatgtacaaagaggctgtgacataactgaatgaatccaatctaaagacgaacaaatgagatccatgagctgaaccgcttatgacaccgcagttgatttccatgcaagacttcgctttccgcgggcggccgctgagcctcctcgtctgtcacgcttttcccgcaggagtcttcgtcttacccttcaatcaactgctagaaggaacgaaacagatgaagcagtattcaagtaacaaaaaaacgaaccactcatcaaacatgttgatcaatggttcgtttttcacttgggctaagatacttttgtcccagcctcacttttattaaagcggttatatgaactcaagctgagaccttggcttaattgcattaaactatttcattatctatcgcccggagcaggatgatctacacctttgacatgatgccgatgctggttgtcttcactggtataaaagtcataatagtgaacatgcataccgttgccaatgggaatagcgggaccagagtaggctttgtaatgatgtgtatgtccgtcttcaaaaacaacatagccttctgtatagtgaatgtggcttccatcctcgctttgaattggaggagacgttacatcgaggcattgatggacatgtcctgacgcaacagaagtgtagtctactgagccatgattatgatgaggaacaaatcctgaaacaaaatcgtccttgcctatttttttcattttacttccccctacaaattcaattttaaaaactgtttaagtaaattctttaaattggcatttgaatttctctttttagttaaattcaaaaatacatgctattgatatgaacaaagaaaaataaatatgacttttgataatctggatttataaaataggtagtcttcctgtgtgtttgccgtttctacttgataactttcacatatatttattaagaaaggacaagttatgatacgaaaggaagtcagcataatgagttgggaaaataaaaagagtctgtgtcaggagtttgcgagaattctaggtggacaaggcagtttagatgaaaatggcgtttgtttggtacaaaagtttcggacgattcgttttaaaattttagggcgtccaacacgctctccattagttactcctcaatttttcacttttgaagatttagatagcaagggaagagcgctaaatctaggtgaaaccgtgcttttgcaagaagaggtaaatccattattaacggagcttagaaaaagagatattaaggttacagccgttcacaaccattggctatttgaagagccgagagcaatgtatatgcattttgaatccgtagaaccaccgttagattttgcacgaaaagtaagagaagcgtttagagtattaaaaggataagaatcagttttttatagaatcagtttattcttatttactgcttttaaaattagattaataaaactttaaacatgtatattatatattggtttataaactgcgcttgaatgaacctatcaggttaactaatttttgagcagtgagattattcgagtacttctatccaaataaaaaaagcacgcgttcgccgcgtgctttttttatgtataaacttaaaatgcgtttagggtgttatcgcttaaccactgtttgcgttcagctgcatcttcgaataactcatctgcatttgtaaattgagaagcaatgacatattcaattgttgcaagaggagctgttagcaaacgccagtttaatacgattgtattatcttgagtcgtagcgtattcttcacctaactcgtcccacttaacagattcaggagcattgtctgctgcttttttaacagatttcaaagcttcttggaatttttcacctgcgcggccttggtaccattctgttaatagttgtccaataccttcatttgtttgctgctcgttccagctttcaggtactgtagcaatgaattttgcacggaatgtcatttcagcctttgctacatctccacgaacgatgtttaatcgatattgacgtcctaggtaagggaatttgtctccctcttcaaaagaaccagttttagctgcagaagctgctgctttaggagcctcttttttagctgtttctttttttactgcttctttctttggagcagctggcttttcctcagctggctgtgaaccgtttagttgttttaaaatccatgttgctttgcgtgcgatgattgaacgcacattgttttcattaagacctcttgggataataacttttaccccttctttgtcacaaatttgcaccgtgatatcggttctatttggaacgacttcaattttgtagtcaattgtttgattgcctgtttgatacgtatacataaaatttttcgtactcctttctacaaatcttcattttataagcaaaggtagagtttggtcaaatgaaagaataatcagacagttatcaactgctgttgcagcgccttgcagaatgatatgtattccaatatttagtgggaaagcgccaataataattgcttcaattcttctttagtttttacaaaaacatataaaaatatgccgatactactaatatagattagacattctatgtctttagatggtatagggaatgaaaaataaaaaaagcgtttcaaagtttacatgtgaaatgctatatatgatggtcataacacttactgtaattgaagtgacaaattattatcttattatgaaacaagagcaagcagcctcgattatgctagtgattacatttctgtttgcttttcttacaactaccgtgttctattttatcatacgtcgctctataatggcggttgaaaatttaacgaaagtaatgaaaggggtttcgtaaggggatttattgatatttgttcagtataataaactgtaagtattggtttttatgatagctttcatagaaagagataatgaaaattgacacgttataaaagcagttgtatagtgagtacgcaaggcggcagtctgtcttttttaattcttagtaaacttataagttaaataaaatatttatacataaggagacgaagggatgaaaaatgaattccgtttggcaacaaatgacgacgcagataacttattgaacttaactctacaagcatataagcctattcgagagataggcattcctttcttagcagctgctgctgatcttgccctcgttaagaaaaatatttctcaaaacctttgctatgtatatgaagaagagaaaagaatcgctgcaactgtgtctatacgaatgccttggggagaacatccaggtccgtttgctgttccgcatctttggtggtttgcagtagacccgtcgtttgccaggaaaggcattggatctaagctgctgcatctagtagaggaagagataataaaaaatatgtttaaatcaccaggtgtgtctttaggaacagcaaaagaacatccttggttagttgagatgtatgaacgaaaaggatatgttcaagctaaagaaaagcaccttgcagaaggttatacgaccgtatttctttataaaaaatttaataaggtacactctttgtcgtaaaagatagagaagttctccaaattaagaaatgtgaaagagtgataaatatgacagatcaattactactaaatacgctaatagacatacgccgtgagctgcaccggtttccagagctttcaatgaaagaatatgaaacaactaaacgtattaaaaagtggttaaagcactatgatatttctatagctgatgcattccaattagacgtaggagcagtagcggaaattgtgggaggaaagccgggacctactatcgcaattcgagctgatattgatgcgctgccaattgaagaaaaaaccaatctgccatttgcatctgaagtaaacggagttatgcacgcatgcggccatgattttcatacagcttctataatcggagcagccactcttcttaaagagcgtcagcaggagctttgcggtacggtacggtttatctttcaaccggctgaagaaacggcttcaggggcaaaaatgctagttgaaaaaggtgtgctcgaaggagtagaagcgatatttgggatgcataacaaaccggatcttcctgtaggaaccattggcatcaaatcgggacctttaatggcaagcgttgatcgttttgaaattgacattaaaggagtaggaggtcacgcgggcatccctgaaaaaacagtagatccgattgctgctgctggtcaaattgttactagtttacaaaccattgtcagccgtaatctcagcccctttcaaaatgttgttgtcagcataactcaaatccatggagggagctcgtggaacgtcattcctgacaaagtaacgcttgaaggaacggtgcgtacctttcaagaagaagcgagagaaaaaataccgggtcttatgaaacgaactgctgaagggattggagcagctttcggggcttcagtagacgttaaatggtatccatatcttcctgtagtaaacaatgatgatacgctggaaaaactggctattaacgctgcagagaatcttagttatcaagtcgtagaagctgaacaatcgcctggaggagaagactttgccgtatatcagcagcatgtaccaggattttttgtatggatgggtacagctggagaatatgaatggcaccatccttctttttcattaaatgaagaggcattgcttgtagcagcttcttattttgctaatctaagctttcattttttgaattcattccattaccgaaaaaattaaaatatttttatttttctatttacggggatggaattgtttgataaaataaattttaaattaaaaagttatcacgagtggacgagagatctggctctttgactccacagcaacctacgaatgtaaggtgctcctaccagcaaagcatgtgctttgggtgataaaacgggtgaaaaactcattttgcatcaaagcaaaatgagttttttttatttttctaaaaggagagggttttatgagtcatacagcagttgcagcacatacaggagagaaagcattaaaggaagcagtgaaattattaggaaagcattatcaagtagcttatcgtgagttagaaacattttatgaaattgtggtcgaaaaccatgttcgtacatatgctgtaggcatagatattaaagatatacaaaaagcaaatgaactagaaatttattcatcatgctgttccaagcttgagcgagtaggctgtcttttatagaagaagtctgctcgcgcctctattttttaagtgtttttaaatagaaagcatggtttttgacaagcaaagaatctggtgggtataatcaatactcaatagattttaaaattaatcataaattgtcgaaatttttacacaaattaaaggttacattcgaaatgaattgtggtatgttataaaacaagaatattttatgaaaggagcattgaaatggaaatgtctcttgaacacggaaacgatgcaggaagcgaacagcttattgatcgtatcctagactttttagaagatgaccaaaagtaaaaaaagagtgtgcggtgctatccctagccgcgcactctttttttatcatgtgcgtaaaggcagcgccatactatgatacatagggatagaatgaaagggtctctgtcaaagggattgacgaatggttttgtttgatagaaaatttagaaaaaggaaagagatgaagggtatgtcgaacaaaacatctttgtatcaaacaaaagcacagttaaaaaaacttgtaagcgaattggtttctatacctagcgtgacaggaacgatggcagaagtggaaatggctgaatcgatagcgtcgtatttattgaagctgccttactttcaaaaaaacgagcaagtcgagcttcattcaacaggagacgggcgatcgattgtcacagcttttgttcaagggaaaattacgaataaaacagttgtactagtaagtcattacgatgtagtggatgtacaagattatggacagtggaaaaaggatgcttttcacgctgatacattaacgagtactttttataaccatatggaacaagttccggcgcacgtacaaaaagatatgataaaaggagactggctttttggccgaggaacgatggacatgaaagcaggcattgccctgcatatcagtatggttgaacgagcatgcaacggggagtttgacggaaacatcctgctgctgtcagtgccggatgaagaagtaaattcgcttgggatgagaaaagcagtgcctgttcttttagaacttgcccgcaaacatcagctggatttttctctcatgctaaatgcagaaccggtgttcagccgctatcctggagatcaaacgaactatgtgtactcaggatcgattggaaaaatcatgccaagctttttgtgttatggaaaagaaactcatgtaggggaaccgctagctggtttaaatgctaatttactagcttcttatttaacaaaagaaatagaattaaacgttgatttttgcgaaaaagtaagagatgaaacgagtccacctcctacggtgctgatacaaaaagatttaaaagaagagtattcagttcaagttccgcactctgccgttgtattatttaatttatttatgttaaatcgctctcttaaagaagtaacagatctgctgttgaaatcggctgacaaagcggctttgaatgtaaaaaaacattataataaagccgctaggcagtacgctgagggaatggagggttcatctcgtgatgtgaacgtatggacgtatgaagaactttatactcatgcagtcaaacagcacggcgaaaaatatgtgcacgaaatggaagcagcacttttggcacaagaggaggatgacagaaataaaaccattaaattagtaaactctttagctggtttatgtaaagaagcagctccgatgatggtcttattttttacgccgcctttttatccggccgtttgttcacatgatgatccatttgtacaagagattttgtcaaacgtacaggcaactgccaaagagcaattccaattggagctagttgaacaaagttattttggcggaatttcggatttaagctatgccagcctgcagcatccgcttcatacatttaacacgttagtagccaatatgcccctatggaataaagggtatcatatcccgctagaagagctagaggagctgaagatgccggtgctgaacattggaccgctaggaagagatgcgcatcaatggaccgaaagattagacgttcagtattcctttgaaattttgcctcatttcatttatcaagctataaaagaagcacacaaataaacatccgtccgcggatgtttatatgttgaatttaaaagaagctccttgtacggtaatttgttgcggtgttagagcgtgatccaattcaaccaaaaatggacgttctccaactttttttaatgtatcatggacaacaccttgtgttccgctgcaaaaaataaggtttcctccattgacatatagtttttgacaacgtgcatcaagtaaagagtctttgtagctttcgccagactgaacgtccagcagtttcgtccacttgctgatggattcttcgaggttatgtacagcacagtaaatattttttagctgcagctgaccagcttggtgggaagaaagatccgctagctttggcttgcgtttttcttctggttcaccccattcaataaaaaaaggaagaggcagggaatcgtggtcagcttcaataaaacacattttccattgaagtctttctccatcattggtttggcgagaacccgctacaggaccttttacagtgacgttcttgctttccagctcttttattagcaaatccatatcatctgtacgaagtgcaaatcggccaaaatgaccaagcagtgtatgttcgttaacaagctgctgaataaggtcattatctgtaacgttttgagctaacgcgatatctctaagcccaagccattcaatatagctgaggttaaaataagccaacgtgttaaaagtaccccatttttcatggatgccgcctttaatgacatttattccgtattcgtttagttctttctgagctttaataggatcaggtgaaaaatgaacaagatgatcaaaagataagtgcatggataggcctccttttaagagagattctttcccattattatacgttgttttccttttcaagaagagtaaaacgaatgattatgtaaaataaaaatcttaaaaaaagcaagccgcgtatgttttaaactcgacttgctttagatttatttagcgaccacagccatgccctttaaagcagcagccaaatgatttattaaaccatggatatgagcagcaaggtgaaccgcagcgacagcggcgacggctagaacggcgagtagaacgacgagtagaacgacgagtagaacggcgagtagtgcggcgagtagtgcgacgagtagtgcggcgagtagtgcggcgagtagtgcgacgagtagtgcggcgagtagtgcggcgagtagaacggcgagtagaacgacgacgagagcgtctgtgaagagcagttggctcttggtacataaacgtttcaagctcagtagaagcaatcgcttctgttgcttctctaattctttcagcagtgatatgcatataaacacctcctggctaattcggtacataatacaatatgtacaaggaaggcgtttggatatagtgaaaacatggaatttgtctaaatttgtgaaagaaatggagtggttttcatgcttcaaatcctcgaacatcaaagagtggatatcgctcttcaaatagtagctgtgcaagtagaagcttatcaagaagaagcaaggctcattggtttttcagatattcctcagcttacagaaagcaaagaagatattatgaaaagcaaggaagtgtttatcggagaaatgattgaaggtaagctagcaggagtgctgtcgtttgaaaaagaaaatgagcgattaacgatttgccgcctcgttgtgcgtcctcgttactttcgaaaaggaatcggaagctgtcttttaacacatgtacttcaaagatattctgaatgtgaatgtatagtgtctacagccgaaaaaaatacacctgcgattaagctgtacaaagcacatcagttttcaattataaaacacactgcagctgctgataaccttgtgttagtaacgatgaaaagagattaagacatcgctaaattaatctaaaggccaacaaatgagctacatgagctagtaggaatcgactgttgatttccgtgcaagacttcgctttccgcgggcggccgctgagccttctcgtcgcttgcgctcctgcggggtctcatctcttccgctattcctcagtagtctccgtcttgctttccaatcaacacagctagaatactcataacaataaaaaaatccgaacgcgttggattctccatcaagaatctcgattcaccgttcggatcttctttcgactaaaataatgttgtcccggcctctacgatgagagtgtttgctcagaataatctagagctgtatgacgctgaatcagcagtaaagcagctaaagtgacaacagctccgataataaaaggcagcgtcatattgagtttaaaggcaaatgcaccaagcagagggccaaaaatacgccctaagctatccattgaggcggtcagccccgaagcagagccatatcctactttggttctcattgtaattaatgagaggacacaaggacgaataagggcatttcctgctgtaaatatgcacaaaaataaggtagcattaacggcactagaagataacaaaatagacgtaaatcctattgctgaaactaataagccaatggccatcagctttttttcatttccttttttaaatcgctgcagcacaccgccttgaatcagcgcttgagttaaaccgctcgccataaacatccatccgattgtcgtaggagtagcattaattttcgctatttgaaaaaattgaaaagtagcttctaaaccagcgagcgtaaaagtcgctaaaaatgaaagaacatataaatacttcatagctccttgaaaatctgacgtgaagtcatgccatctcgatgtctgtactttatcagcagattcttttcgtaaagattcttttaacgtaaagaatgagaacgctgtcataatcagtgacaagataccagagataacgaagggaacaaacaagccgaaagatgaaaggacgccgcctaatgccggtccaaaaataaagcctaagccaatcgacattcctaacagtcccattgctttcgttcggttttcttcatctgtactatcagaagcatatgcaaaagcacaaggaataacagctcctgcaaacaaacctccgatgatgcgcgacgtatacattaaagtcagagagttttctgccaccgaaaaaagaaaaaagcttgcgctaaagccgagtaagccccaaagtaagatgggacgccggccttttatatcggaaagcttcccccaaaaaggtgcggtaataaaagatgcgatcgaatagctagccattagtattcctaaattgaccgtgcttgcacccgtggcacgaataacttcaggtacgatggggatgatcactccaaagccgacaaataccataaaaataacaaacattaacgttccaagctgtttgttcatatgcaattaagcccctttctctgtagaacatgccgtgagtttagtataccaaatacaaagaagttttttacgtatatttggtaaaaagcgttttatttacaaatggataactatgttaatatttacctgttgtgctgaggatgatacaattaaaagaaaagggacgtgaagtgattgccaatatggattgtatttgctgggatcataggcggtcttttagggtttggggcgctagtggattatatagctaagaagagaagtatcgaattagatccagaagaaggaataaagaatgcttctgatgcagaacaaatctatgtggaaaattatctttatcaaacaaaagaaaataacaatcactttcaataaaaaaagcttggagacgaatctccaagcttttttaatgcggtaaaaagatgagctgatagaggaataaaacagcaaagacatacacaagcggatggacttgtttgccttttccttttaccagcttcattaacggataagaaatgaagccaagcgcaattcctgttgcaatacttgatgtaaggggcatcgctagaacaactaaaaaggcagggaacgcttcatcaaagtcattccaattaattttagctacagcgcccatcatcaagcttccgacaataattaatgcaggtgaagtaatagctgctacgccagaaaccgagcttacaaccggactaaagaacgctgcaacaataaataaaatggctaccgtcacacccgttagacctgtacgtccgcctgctgctacaccagatgaagattcaacgtaagccgttgttgggcttgtaccaaataaagctccaatcgttgtaccaaatgagtcagcgagcaatgcttgacgtacgcgaggcatcttattacctttcataagaccggcctgttgagctactcctaccattgtacctgttgtatcaaaaattgtaacaagtaagaaagaaaaaacaactgtgtacagatcatgatgaataacatctccaaaagcagcaaaaggatttgaaatcattaagccgtctggaaggtgaggagaagcaaacaaacctttatcaaatgaaagcagtcctctaaagaaagcaattaaccccgtaataatcataccgaagaataaagcgccgtttacatttagcgtatataaaatgattgtaatcgcaagtccaatcagtgttaaaactactttttcagactgcaaatcaccaagtccaattaaatttgacttatttgcaacaataataccggctgaacgaagcccgataaaagcaataaataaaccgataccagcactaatcgcgtgctttaaattgtttggaatagcttcaattaatttttcacgaaacgatgttaacgataggatgataaagataatgcccgctacgaatacagctgaaaaagcagtagcatagtcgatacttccatttgaaccaacaactaaagcagcaaagtatgcattcattcccataccgggagcaatagcgattggatagttagctgcaagagccatccatagcgtagctacgactgctgaaataatagtagctgtaaatacttgatcaaaaggaacgccggcgctggacaaaataactgggttcacaatgacgatataaatcatggttaaaaacgttgtaataccagctaaaatctccgttttagcatccgtgttatattcttttaacttaaacataagtaacctccaaaaataacgaacattaaaagcaacatgatatataatattcgttttttacttgaaatgcaatagatttgcatataaaaaatcaaaaactaaaaaagtgacgataaaagagttaaaacaagtgtgaaatatttctttttttcggtgctttttatagtgtgtgcgtatagaagaggctcatacgaaaaaaagccgcttgggctgcggcggctatgttgcttgttttgaggaaacgactattggaaattttattttaatggaaagagttaaatcgttatacgtatattccaagcgtccgtggtagttggaaacaagttcagaaatgatccacgtgccaaggccttcgtggcgttctttcttttctgtaacatgaaaagaagtaaacaagtgatcttgacgctctcgtgataaaggagcagtagaattgctgacttctaaaatgtaaatgccacttcggatcatactcgaaacggttatctcttttttctcagaagaatgagcggcttctaaagcattatgcagtaaattcataatgagattcatttggtcaaggtgctttaaaggcagctgtgataacggtgaatctaattgaacattcatatgtattccccacgtatgtgcttgattcttgctttgatgtacaacagaagcaacgtgcgaatgttcaccttgaatatatgaatgggtatcattcaaagcttcaacgtaatcttgaatgtactcttgtgcctgctgtctttgatttgtttctagaagataggatacggcgctgacatgtttaataaaatcatgtctttcagcccttaacgcttgaaaaagctcattgtttttttgaatttcacgtgaagcactgttttcccggttggttacgaatatgtattgttgataagaggaaaacatgtcggtcatgtaaccaatcattgcgataacggttagggcaatgctaaaaggtgaagataggctaaataaaagcaggaaaaaagacgtcagtacgattgctttttttatcgttagtggaggagccgtttgatatttctttctccatataaaaaatgaaccaattataaaagaacaaagtaggagatgtaaactaacaggcaggtctttaaaaaagaggagcacgaaaacagttagtaaaactagtgtgtaaaatagtttcattttagatagtccctcctttaaaagtattctttttgcaagatgtctaaatttgttttcgtgattaaagctgttttttcggtgctttgaaacatcactgagtaggagtgcttagtatacagggagaaattttgaatataggaaatgttgataataaaagctcgatgagaccttagaaaatgactcgctgttaattctttttcaatttcgtttaatgattgataagtactaaattctccatttatcgttatgattgtggtagagcgacctgttcgttctgcaaatataatatcttgtttgttcagcacttgcatttcggttttttgttttaaaataagcttatctcttgtgtcagttgattgttttttttgatgaaaacgctgaatgccttttaacagacgctctttagaataaggcttcataatgtagtctaaaacgttgagttcaaatgcatgaacggcaaagccgctgtgcccagtgacaaagatgacttgaatatcaagtgcgtaagcattgataaagtctgcaagctcataacctgatagctttggcatttcaatatctgtaattaataaatcaatttcattttttttaatttcgttataagcttcctccgcgctgctagtcgaaaaaagtatgtctatatcatcttctctttctaaagaaatcctcaatttttctaaatcatatgaatgatcatccactaatcctactttcataaataaaaaccctctttgtttcattctattggatattaccacactattttaccatgatttacaagatagaaaggacgtttcgcgacataaaaaaccctctttatgacaagatggaagatgctgtatgaaaaataagctaagatagattcaatcacagtaaaaggggagagcagatatgattgaaatcaaaggtgtgacgaaatattttaaagagaaaaagcaaacaattgcagctgttcaagatattcatgtaaccatcgcacaaggagaaattgtaggactattaggtgaaaatggagcggggaaaacaactcttttacgtatgctgtcgactgtacttgaaccatccgaaggtaatatgttcattcacggaataaacattcataaacagcctgataaaataaagaaaaaaatcggcgtcctttttggcggtgaaacaggtttatacgaccgtttgactgcgcgtgaaaacttagcttattttgctaagttttatggaatgagcaaacatgaaacaaagataaggattgaggaactggccaaacgttttggaatgaaagactacttggatcgccgcgtcggaggcttttcaaaaggaatgcgtcaaaaagtagccattgcacgcactattcttcataacccggacgttatcctatttgatgagccgactacagggttagacattacatcagcaaacatgtttcgtgagcttattaaaaatctgcaaagagaaggaaaaacgattgttttttccagtcacattatggaagaagtggagatgctatgtcagtctatcatcatgattcataaaggaaaaatgatttatcaaggaacaaatgaacagctttataaagaagaggaaagcacagacttaaactacatctttatgtcgcgtatcgtgaggggggcttaatatgatttggcatatttataaaaaagagttaattgattgtttgcgagatcgaaagacgattatctttagtgtgttgattcctattttattaaatgtagggatgctgttttttgtagatagaatgatgtctagtaatcaacctgatggtatgtccatagctgttgagaaaggctcagatacaagtgtagtggaatggttaaagaaagatagaaaccttcaagttgtggaaagcgaagatccgcttcaaacagtggaaaaaggcaaagcatcagtagctttaaaagttgataagaaattttctgataaaattctccatatgcaatcgccggacgtaatgatttatacaagtccagatagcgtagaatcttcacgtacaacagagtacgttacagctatattaaataaacagagagacggcattataaaagaacgtttaacacaattaaatattaatgatcaaacaattcagcccttctatgtcaaggaacaaagcctttcaaataaagataatagttcattaattatggtggcaatttatgctcctatgattattgctataggggtgttaggtggtattgtaccttccgctaatgatattttcgcaggagaaaaagagcgaaaaacgatggaagctctactcatggctcctattaaaagactacatttactaatagggaagtggtttactatttctacatttggggtcttaagcggagtgctttctactatttcatttgtgctttttgtacgctactttaccgtgacgttaaatgatgccttgaatctaaataatcatctcattgcttttagcgcttcattactagtggctatcactttgtttgccttattagcagggctaattctttgtatctttagtctcttagcaagttcggttaaagaagcgcaaagctatacatcgcaaattgttacagtagcgatactgccatgctttttactgatgggaaaatccgtacacgaactgcagccaagcggattcttaattcctatttataacgtatttgcacttatgaaacagcttctctacggtgtctatgacatgcagagtcttgcctatacaataggaagcttgtcggtttgtacagttgttttatttacgattggttatacgatgtttaccaaaagccgctgggtgcttggtaaaggttaagagactgggcaaaagtagtttagttgaaggaaggtccgaacgataagtcgaggttcttgataaagaatccaactcgttcggattttttcattgttatgattatcgtatgtgtagttgtttatctctagattcaattgatttcgttatgtctcaactttttgtgtagggaaagagcaattaaaagagaatgtaggaagaaaggagagtgagacagttgcatcctattatagtagaagaaattcctgactctataaaaaagtatgtgaaacaaatcgaaaaagtgacgtttccaaagcagggatgtacgtcggatgttggtatccttcataccgttaaaggaaggtatgttttaaagcggacaaaaggggaaaagtacagaaaatggttatataaggaatattatgtattaaagaatatacaagcactggcagaatgtcgaagtccgatcgtttacaaattcgtcaaaacagcagaagagagctggctgctgctagaattttttgaaggaaaaactgtaagagagtatttagagaaagaagataatgaagaaaagcgcgagcacattgtctacgaaatggggcgtcttcttgctcgcattcacgatgcgaagtgtccagaacaattagtgagtaagcagctgtggatccaccgaatgctgcaagaggcagagtacaatttaatccactataaggtagacggaaatcaacagctgctaaaacaactgcagaagcaaaacatgatatgcaaacaagaggtgcttattcacggagactacacgattgataatgtacttgtgcacgacggtcggataacagctgttattgactggagcggaggaacttggggagacgctcgttatgatatggcccttgctgttcgctttgaagacggaatttttacaggtaaagagcgcgcgtgtttttttaagggatacggcaaggggatttcacagcacgaattttgttattttgcagaaggattgtacgagtttttctaagcaataatgacatcattttcttcatttgttgaacgtccactttctttgacgaattcatactagttttgtcacgtatgaagggatttaaaaatttctctcgaaatggctagtaaatgaaaaaaatggagggatggaacatgacgatgaaaacggtagatgtggcaaaagcgctaggaatacatccaagtacggtattaaagtgggtcaaaatggcagatatcgagctagagagaaatgaatcgggacactgtgagtttacagaagaaaatgttgaagcacttagaaactttcaaaaaaaccgcaatcgtcaagccgtcgtcaaagtggtagaaaaagtagtggaaaaagaggaagtcgttatatctgatgaacgtgcacaagacatgcaaaagcagcttgatcagctttttttaaggctaattgaaaatgaaaagcgtacagaagaaaaagcgggagaagtagtgacttttcaaattttagagcatcgttcagaaatcgatcgattaaataaagttattacgaaattagaaaatcgagtagtggaacttgaaagtcagttaaaaagtgaagacagcttaaaaggtaaaaagcctgttccgagatggagaagctttttaaccggtatttttagctattagcagcgatttaccataacggtaaatcgctttttttatggaattttatgaaaaatacatcaatttgtacagaattgtggaaaaaaatctcaataatagttgacgaaacgcttagtaatttgataaaactaattaagttaagaaagtgaaatactttcgtaaatacatattcgttatcaggcgatagcgttaaggagagtgacaagtgaaaaaaagagaagagctcgttcaagaaatggagacgctgtttcgctttgtgttcagacagctacgccaagaaattaatgaagtatacaattcagagctatcaacaaatgaatttatggtgcttcgtatgctggttgattccggcaggcagcgatcaactgatttatcaaagtatcttcaggtttcagcaagccacattaccgcggtaaccgacttgcttttatcaaaaggctacattgcacgcaaacggtctgaaaacgatcggcgtattattgatatcgaactgaccaaggaaggacaggatatttttaatgctattcaagagaagaaacgagcctatttccttgagcgttttgagcactttacagataaagaaattgaaacggtgaataaactgtttcacaaaattaaaggcgatcaaaaataaagcgctttaaatgcggaagaataatcagcgaacatggctttcactgattatttttttgtcttaaaacgcaaagagtatgaaaggcaagttagttggtgagaacataaaatcagcgtataataatagaaagaacacatgaaggaggtcatctttttgacagaacaatatgaagtagcaacttttgccggcggctgtttttggtgtatggtgaagccctttgatgaacagccaggcattataaaagttgtatctggctatacaggcggtcacaaagagaacccgacgtacaaagaagtatgctcagaaacaacgggccactatgaagcggtccaaattacatttgatccagaggtttttccatatgaaaagcttttagaactatactggcctcaaattgatccaactgatgcaggcggacaatttgcggatcgaggcgattcatatcgaacagctattttttatcacaatgaacaccaaaaggcactagctgaagaatcgaagcagcaattagaagcaagcggtcgtttttctgagccgattgctacacaaattctaccggcaaaaccgttttatgaagcggaagaataccatcaaggttactataagaaaaataaattccgctatgctatgtatcgacgcgggtctggacgtgatcgttttattaaagaaaactggaaagactttggacgcgacgagcagctgaaaacgacattaacgcctattcagtatgaagttactcaaaatgacgcaacggaacctccgtttcgcaatgaattttgggatcatacagaagatggtatttatgtagatatcgtatcaggagagccgttgtttagttcaactgataaatatgatgccggatgcggatggccgtctttcacaaaagcgattaataaagatgaagtaaaagaaaacatggacgttagtcataatatggttcgtacagaagtacgaagcaagacggctaactctcatttaggtcatttatttgacgatggtccgcaagatgcaggcggcttgcgctactgcatcaactcagcagctcttcgctttgttccgaaagaagatttagaaaaagaaggatacggggaatacacggttttatttaacaaataaaataatatgagaaaaagagcgtgattcaacttaaagttggctcacgctcttctttttgtgctttcttttgttttattttggctcgaatgaggctatagagaaaaaggaaaggaatgtagccataaataaagtaaaagccggtcatggataatcgtgtattaagctgatcgatggtttcccgatcatcaaagaaaatagagaaaccaagaagagcaataagaacgaatatgagaaaaatcgtaggcggcttattaaatgttttactaaatccacgaatggtacaccatacgctgacagcaatagtaggaagaacgactaaaagccacagagaaattaaaatatattcaaaacgctgtaaaaaggggatttcaataattttggccatcgttaaagttggccagatcgtatgcattaactgtccctggctaaagtaggcaaatgaaactaatgctgtgcacaagtataaaaaagcactgaacaaaatcccaagttgaccccatttttggctagtagcgccgttttttataaaaggatagaaaaaaagcacggattcaaatcccaaattctcaaaagtcatcattttagttgaaattaaaaattcccatatcgtgtggtcaaataaaggaaataaattattaagatgcccatattttaatggataaagtaaggcaaatacgagcggcaagggaagcataactccaaaaaaagcaattccagtaatcacacgaaatccaccggagactgtatagtaaataataggtaagtaaacaagtgatacaatccatgtttccagctgcggaaacatccatatttgtaaaatttctacgtacgtccggtaaatggttaacgcaaaaataaaataataagccgatgccgcaagagtgaaagctcctccgaggtatttcccaaaatataaccggtgaatatcaacaatatcgctgttttcgcggattaagatattaaaaaccatggctagtaaaatacagacgctgatcgcagcaaggatgatagatatccatgcttcataaccagctcctttaataatgagacgctgaaatcctagtatcccaacgccaatttgcgtagaatgcactagaaaaaaaagaaaagaaggggaaacttgattttcttctttaattgtattgtgcatcttttcttcctcctagttgctaataccggtttgaataagatgaacgcgagcttttacttcaatattcatatccggatattgcgctttgaatttttcactgttaaaccctcgcgttttacttcgaacataatctgtaaaacaaatggggtcgattttgtgccgctgaagcttcttaataaaggcatccccgtctttttcaatatctttttgaagcgttttttcaaccattttaatactagccgggtctgttaaatctatccatccaggaaactcttttacaaggccattgatagttaagtgcgcaataatacttggatgttgatgatttcctttaatttcatactttgttttggtgcgcaagttttgcagtataatttcacctttacggtcactttctttaatttttaccgagtagcggccgtgctttgctccgcttgttagcagcttaaataaaaacgtttctttcattccgatggttgtaacgactttttgttttttgaaaagcgccagtccctttaatttaatggcatctttttgctgcgctaaaacaggaagataagggtcgcggtcgtcgctaaaaaaactgaataaaaaaatttgtaaattggtgttaggcaaattttctgtgcggatattttgttcgattaaattagaaataaactgatagtctttaattttctttttcgtaacagagctcaataattcatgtgcgttaccatctgcaatgcttaatttaatattacgtccaaggtctggatttctagcaattgtgtttactaattcatccacgccatgtgttgcaaattcttttcccatgacgatgctccttaattgaccaaaagcgaccggaagagatgatttattgtttaaacgaagcggaatatcaaaggatgaattagcagtagccgcaataatactaggttcttccgttggcccgtacttataaatagggtataaaatggttcctctcactttattgctttgaggaatataatcatatccgatggagttgactacttgaatttcgtcaattgtttcacggtctgcacagctcgttaagaaagtaagacaagtgcataaaataagtattctcttcatggcgtttccccgctttactcattatctaaattactttttcgtttagtcttattcgctttattagggttatagcggaagcgttctaaaggacgcaagtagcttggccgctttgctgtatgactatagggcaatcgcagaaaggtatccctatactctgttggacgaaacggaaaaagcggaacaagataaggcatgcccaaagattttaaacgaagcaagtgaaccagcaggaagcaaaagccgaacgtaatgccgactaaaccaaacgcagtagcaaacaaaataaaaggaaaacgtaataaacggatggtgttagacattttaaaaataggcgttgtaaaagaggctaaagctgtcagtgaaacaataataagtaaaatattgcttgttaatgcagcttctactgttgcttgcccaataacaatcccgcctacgattcccagcgtttgacctacttttgttggaagtctggctccggcctcgcgaagcagttcaatggttatttctaaaaaaagtacttcgatgaccggtggaaaaggaacgtttgtccttgaaaaaataataggcccgagcaaatcttttggaagcatctcataatgatacgtaacaatggctacataaagaggcgtagcaaaaatagagaaaaagacgcctaaaatacgaataactcggaaaaaagatcctagaacccacggcagatagtagtcttcaggtgaaacaaagaagtcaagcagcgttgacggccccgtaactgcgtagggtgaaccgcttgaaaagaaggcagcttgcccgtttaacagactaaacaagactcggtcaatccgctcggttgttaaaaaaagcggaaacgccgtagaagaattatcggaaattaattgatcaagcattgtactatcaaaaatgacgtcgaaatctatatcttcaaggcgctgcgtcatagtctctacgtgctgagggttcgttacgccttctaagtaaacaagaacgacgcgcgttttcgatttgtttcctacggtaagttctttaaaaataagattttcggaaatgaccgtttttctcattaaatagagattgacatctaaatcctctacaaaaccaattttaggaccaacaacgctgaactcattttccgtttcattttcttttcgaaaacctgtatcaaagctttgaactttaataagcgctactagcttatcgtctttatgtaattgaaacattacgtagccgcgcagcatcttttctaaaatctcttttgtatcttttgtaacggaaatatcttcgattggcagaacgttttcgacttcttgcacactgcttaacgtgaagtctagtttttgaaagggctcgagtattttatcttcaacgctttgcatgtttacgagctgcttaaaataagtaatgatgtattttcgatgctgtgagccaatggctaatgtcataaagtcacttgatttcttaaactgtttaatcagttcatccaatgattttttgggctgatcgtctgcattcttttttttaaataaatgtttaaacataaccgtgcccctcacttgactttctattactggtagtttgttcatgtacttcctttttattcgactattttttctcaagaagaaaggaagaatataaagacaaactttacactcttttacagtgggtaaacagtggatttacgtttgaatggtaactttagacatgtcgaagataatgaaataaaggagcgggtacatttatatgaagaaaaaattagcaggtattacactggcaggagccgtagcattggcctcgtttggtgtaggaaactcacttattcaaacggaagcaaaagtggagcacaagtcagctaagaaacctcaaaatgtcattatgatggtaatggacgggacgagttcaaatgctactacactcgcaagatggtacaagggaaaaccgttacatatggatcagctgatggccgggggagtacgtgcgtattcggcagaatctgctattacagattccgctccggcagctactgctttagcaacaggaaataaatcaaattcaggctatgtaggtgtgcttccttcagtagtgaatacacctggaattaaacccgtagaaaaagaagatcaatttcgtcccgtagcaaacgttctagaaggagcaaagctttcagggcgcgcgacaggaattgtggctacttctgaaatccagcacgccacaccagctggtttttcagcccacaactataaccgtgatgattttcaaacgctagcggagcagcaagtgtatcaaaacattgatgtagtgcttggaggaggtaagcaatctcttcttccgggaaaagaagaaaaaagccggaaagatagtgaaaacttagtcaatgtattgaataaaagaggatatgactttgtagaaaataaaaaggaattagagcagtcacgcgccaaaaaaatctgggggagcttcgccgaccgagacttagcgtatgatatggaccgaccgcagacaaaagcagaacagccaaagttgtcccagatgacaaataaagcaataacaacactatccaaagataaagacgggtttttcttatttgttgaaggaagcaaaaccgattgggcagctcatgcgaatgatccaataggcatgattagcgatgtactagcgtttgatgaagcagtaggcaaagcagtagagttcgctgaaaaagatggaaatacgatggttattgcgattgccgatcacggaaacagcggtctttcaatcggtaatgcaaatacaacaaaaggatatgataccacacctgtttctgcttatattgatccattaaaaaaagcaaaaatgacgttagaaggtgctacgtctaaattaaaagaagatttatcaaataaagaagaagtagctgctctgtatggtttatcaaatctaacttcagaggaaaaagcgcagctgactaaagcaagagataaaaaagaaatcagtgctgcactatcgaagttattagccaaccgagcaaaccttggattcacaacgggcggtcatacgggtgaggatgtatttctgtattcatacggcgtaaatcgaccaacggggcactttgataatacggatattgccaaacatatggctaaatcaatgaatattaacttaaaccagttaacaaatgaattatttattgaagcaaataaagcttttaaaggctcaaaggtagcggttgactcaaaagacaaaaacaaccctgtgctggttgttacaaacaataagcgaacggtgcgttttccagtaaataaaaatattgctattgtaaatggaaaagaaattcaaatggacagcgtagtggtacaggataaaaagaatcgcttctttgtatcaaaacaagcacagcaaattgtaaaaaatgaaaaataagaaatgaatgcaaaacaggtcgggttataactttaggcctgtttttttacaaataatagatggttaattaggttatgtagcctttatagaggaatgaagctatttattttacaaataaatagctttgaacacttaaagaaatggaaagtcttcacgtttaactatatgtgatttatactatgaaatggtataataatcatagttttaaaaggaactagttcggaatacatatgtaagttcatacctttgtatgctagaatttttataataaaatgaataaaaaatacataaattcttttggatgaaatcacaaaaccatggttgttaaggacaatatgtaagtaattacctttaataaaaagtaaaaaaattaacaaaagtatgggtgaaagagcgtagaacatgttttaatagtaagagaaaacaaaatgattgaaaagagcgtgtcgcctttatctaaaatgttaaataaagattttgacatgctgatttacagattataaaaagggtattaaatcattgttaggaaaataaatgataatggataaacggtttttatgtcttcttctagaaaacctacaattattgcaatattccccatgaacaatcgttgtgtgtttattaacgattagcgtccgtgtagatcattcatctcaacataaaagcactataacgatgtgtagacatgcataaaacagaatgggcaatagttcgtactatactttaacattgtatcctagggggagtcaggatgaacaaaattaacttaattattgccgatgataacgaagattcggttgaaattttagattattttatagaacagcttccggaatttgaagtgattagcatctgcaaagacggagagcagcttgtacaggaagtgatggctaagagtccagaccttttgctcgtagacattaatatgcctacgattaacggggtagatgccataaaaaagtgcctgcgcattaagccgaatttaaacttcatttttatcactggttatgatgaatttgctgtgaaggcatttgagctgtcagcactggattacattgtaaaaccgattgaaaaaaccaggctttatatggcgttagagcgggcaaaaaactccattggaattgataaaaatcagtcaaaaaagccaggggagaaattaaaaagactacctgtaaaatttaatggttctacttattacattccaattgatcaaattatttttatcgagaaatccggaaaaaaatgcttaatctatactcaatcacgtgtctatgagacatatgaaaatattagtgatatctatatgtatttgaacccttctgtatttagtcaaacacaccggtcttatatcgtgaatttacagaaagtttcgcacatcacaccaaaaaacgaaacatatcttgtttatttcttagaaattgatgaatatgctcatatctcaaaattaaaaatccaagacgttcaaaaacagctgcatcagttaatgacgaattaagagatgctgctgcttctaaaatagctatgttgatgaaaggacgaagcttatgcaagtttcgtctatttcatgtgtctgctttcggaataaatgatagtaatatagttcttatgagaagagttagatagaagaagtaacgttgaattgaaaggaaagcaaatgatgtcaattactggtcactataatgaatttaccgtatttcttgctgtcattgtagggattcttgcctcttatacagcacttgatattatgagcaaaatgataaaaaaacagcggaacaattatttgtggcttacactgtcagcaacttcaatggggcttggagtgggggcgatgcattatattgctatgcttgcttattatgttcctgttagctttcattttgatgctgtactttctgtccttgctttaataatagcgattagcggatcattagttgcgttttggacattctggaaatggcgcacgtcggtatggtcagggcttattttaggaagcagcattctgggtacgcattacattgcaatggcagcaatcgaaacagaagcacgaattcattatgccctgctatctgttttgctttctatcatcatcgccctggtcgttgcattttatgcgatgcacttgttttttcgttcgaaaagcgtgaaggctaatccgtttcttaaacttgttagctctattttactgggcattggaatttcagttatgcatttcatcagtatgtatggaatgaagctgcatattgcacactcagttgctagaaaatgggggcagtggctgccgtatcaagcgccattttccaatattattgcaagtatcacaattacgctactcattgtcttcctgctcgttgcagcttttaagcgtcaagaagaagtgagggagagtcaattaaaagaagagtattatcaatctctttttaactacaatcccaatattgtgtgtgcggttgatttgtacggcaatattcaaacgattaatccaaaaggaatcgagctaacgggatacacgttgcatcaaatggagaaaattccgtttccttatatgtttagagaagctgagaaagctgaagaatatatgtggaaatctctgagcggagactctgtttattatgaagcaacgctcattcgcaaagataatcagcctgtatatgttgaagtaacgcaaatgcctattattgttcatgatcaaattaaaggcagttacgtcatcgccaaagatgtgacggaccgaaaaaaggctcaacagcagctgttggatttacaaaaagatttaaaacgcacgctttcacagcaagatggcgctatttttaaatttgtgaaaaacgataaaggatatattcataccatgtgcgaaggaaagatggttcgtgaaatgggatatgaggaaatagatgttgttggtaaaacacttgaagaatttttgcctgaatcctacgcaaaagaaaataagagatactatgagaaggcatgggcgggagagaaagtgtcttatgaagtacttttgaacgactttgcttactatacgaagttaatacctcatatctacaaaggagaagtacaagaggttattggttctatagtagatattactgatcttcacgaagcaagagaaaagctggctaaaagtgaaagcatgtatcgctccgttctctctacaatgtcagaaggtgtagtgtttcatgaccttgaaggaaatctaattgctgccaatgcatacgctgctaaaattctaaacgtgccttacgaccaaatgttatcggttaacccgtttggtttagactgggaaattattcatcctgacggtacaccttttgcactggaagacattccatctgttcgttgtcttcacacaaaagagcctgtacgaaacacgatcatgggcatttatttaaatgagaaaaagttgacttggctttcggtgaatgctgaacctcttcaagaaagcaaatattataaaggcgtagttgtcacattttatgatattacaaaacagcaggaacaagaacaagatttgcttcattccaatcagcaaatgattatagcaaaagaagaagccgaaaaggcaaatcaagccaagtctgaatttttatcaaaagtaagccatgagcttcgtacgcctttaaacagtattttaggctatgcacagatattggaagagcaaggggaaaaagatttaacagaaaaacaattgaatcgtatacggaaaattttaaaagcaggtaatcatcttctttatttgataaatgaaacgcttgatttatcgaaaattgaatcaggccacttagcgattaatcttgaaccggtgtcggtaaaagaggcaattgaagacgcgcttaaaattatgaaaccactagcaaaagataagcatagtatactttatactcgctttcacgcataccaagaagtctttattgaagtagatgaacttcggtttcagcagatcttattaaatctgcttacaaacgctattaaatattcgcccgcttatcgcgatatcactatctataccgacatcactcagcgtcacgtaactatatcgatcgaagataagggttttggaattccagcttcagaattaaatcggatttttgagcctttctaccgtgtgaatagactagaaaaagacggaacaggaattgggttggcgcttgtaaaacagcttgttgtattaatgaatggaacgtacggagtgcgaagtgaagaaggaaaaggcagtacattttgggtgcgttttcctatagtccatccacctgttcctaaacgattatccagtggaggggaagccgagtcattcttaggtttttccatgccaatttcaattgtgtatattgaggataacgatacaaatatcgagcttatgcagtcgattctttatccatataaaaacgttaagctcttagttgccaaaacaggagaaaacggcatcgggctaatcaggtccatttcaccggatatgatcttaattgatattgatctgcctgatatgaatggttttgaggtatgcacacagcttcagctggaaaaagagttgaagcatattccgcgagtcgccctgagtgcaagcgcgatgcaaagcgatatcgatcaagcttttttagtcggttttagtgaatacgtaacaaagcctattcatattgcaacgtttttgaatgtattaaaacgcttaacaaaagcttaacaaaagtttagagggcttttaattgacttattagtggactctttgtaaaataaaaacaacttaatacatttacttcttaaggagtaaaggggagtagcgtcagggaaacctgaaacaaagtcgtcattacatggagtattccatcggctttgttggcataatgattatgcttagcaagacctttgccatatttggcaaaggtctttttgtgttttattccggtaatgaggataaataaacttatacaagaaatgagaggggatttttatggatgcatcgcttttgttagagtatggatgggtattgttagtgctggttgcattagaaggaattttggcggcggataatgctcttgtgatggctattatggtcaaacatttaccggaagaaaaacgcaagaaggcattattttacggactagccggtgcctttatttttagatttggttcgttgttcttgatttcatttttagtcgacgtatggcagcttcaagctataggagccatttacttattgttcatttccattaatcatattgtgaagcgatatgtgaaaaaagacgatcatgaaaaagtgaaagaagcagacggaaaaaagggctcaagtttctggatgacggttttaaaagtagaaatagcagacattgcttttgccgttgattcaattttggctgctgtggctctcgctgttacattgccaacaacaaatcttcctcaaattggcggactcgatggcggacaattcttggtgatcttcgccggaggaattatgggattaatcattatgcgttttgctgcaacttggttcgtgaagctattaaatacgcgcccaggcctagaaacggcggcttttgctattgtaggctgggtaggagttaagttagcggtgtatacccttgctcatccggaattaggtattattaatgaacatttccctgaatcaaaagtgtggaaaattacgttttggattgtgttacttggcatagcagcttcaggctggtttctatctaaaaataaagaacaaattgatcttgaaggctcagagaaagaaaaagaatcgttaaaaaaaattgaaaatcaataatatagaaaacgcgccttcaatgctaattgaaggtgtgttttctatattaagacaaaatacctagtttggattgtgtagataaagggtaaaagaactaactaatgtttaattattttatatccgaatgttttgctttttcgttcatattctgtagagaacagaagcagccgtgagtaattcagttcaatgaagtttatttcagtttataaacatatatttcaaatgtatgttaattggtaaaattgagctattatgggttataataaagggaaattaaaaggagcagagcgcttctcaaccctgttcgtcatcaaaagaatggatattaacatggtataaagcaactgagtatagtaaaagaggtgaagccaatgctcacaaaagttcaaacgcctccatcgcttgaaacgcttgtactgacgattcagcaaggggataaacaattacataacgaaatgattcaacaatataaaccgtttattgctaaagttgtttcagctgtatgtaaacgttatataagtgaagctgacgatgaatttagcattggtctgattgcatttaatgaagccattgaaaattacacaatccaaaaaggcagatcccttcttgcatttgcggaacttattattaaaagaagagtaattgattatattcgaaaagaaaagagaaatcaaacgctgctctatagccgaattgaaaatgaaggttttattcaaggcaaggtagaaagggatatatcgctttctaactataaaaggcaaaatgaaacttcatatattcaagaggaaatgacttatttttgtcagacgctaaaaatgtttaaattaactcttgaagacattattaacacatctcctaaacataaggatgcaaggggaaatgcagtggaagttgcatcctttatcgtcaaggaaaaagaattaaaagataagctgtttttaaagcggcagcttcctattcgcttgattgaaaaacatgtcaaagtgagccggaaaacaattgaaagaaaccgtaaatatattatcgcgatggttattatattagcgggggactacgtgtatttaaaagactatattatgtaagaaaaaggcacacgcaggtgcctttttttagccatgttatgaagttatgttttatttttgtgtactgccgcttaagtgagcttgagcttgttgcaccaagcgttttgtgatttctccgcctactgaaccgttgctgcgtgcagcagtgtcagaacctagagttaccccaaattcttgagcgatttcatatttatattgatctaaaaattgttctacacctggtgttaatagtttatttgttctagccatgattagtcatctccttttttttttagtggtacagcagggaactgctgtacctgtattatttgttgtttcctattttgcatactggtaatggtttgcaagaaagtataaaaaagcccagctttcaaagaagctgggcttttttatatattattttacaactgcatattgctcaagagactgagcaaatgacttttgaagagattttacttgttctacgtatgcatcagatacgtgttggaattcttggcgcgttttcttttgctcttctactaattgtgttactacttgatgatattgttcttgagcttgctttactaaagaatagcttgatttgctttggttaagagaaagctcttgtaatttatttaatgcttcatgcgtgcggtttgtccattcttcataagaatcggcaacagcgtttccagctgttttacgtaagttttcaactgttttttgttgaagatcttctaattcagctttccattgtttgtctgttgcttgaagttgttcaactgcttttgttacaaattcttgctgttgctcaagtgcttttaacgtccattgctcaatttgtttgtttccttctgcaatgttttgtaacccctttgtccattgttcccacattgcatcaattactgtatcatactttactgttgacataatcaaattcctccttgaataatttggtctggcgaacagttatcgtaatgaacaaaacgttaaagaagaaattcgtagttgtgtgataaacctaacattccgcgctcgctggttgaccgtgaaatttaacattatattaggaaacgcagatgtactgcgtgaatccctttaatcgttttcttcctcttttgattcttttgactttttagaagaagaagagctaaaagggaacaacatgtcggtatacatgtgaaaaaatgaatctaacatgttttgatactgttcaagtgaattagcccacatgcttaaatattgttcgccggcatctgttaatgagtaaatccggcgtgcaggtccttcagctgacgtatcccattgcgatgtaatcaagttgtctttttcaagctgtctcagcgtgcggtagacatttccctgatcaactgatgtgaatccaaagctcattagttgctgaatgagcttgtaaccatgtagattccaacctcttaaacttaaaagaagaaaaggaaccatcaagttttttggtgcaccgctaatcgatttttctaagttgtttgaattagaggtgttatctttttcacttgatcccaaggtaatcaccccttcgaaaaaagagaatttgttttccatatgtgtaatttacacctagatgaaaaacttgtcaacactttaaaacaggtctttcaaatacaggaaaaaagaacgattttttggatttcgacaaaaagcgtcaaaaaaattcaaaaataaacaaagatttagaattgtttattttggaaaacgtatttataatagtacatgtaggtaatttttataacatttataatttgttggtaagtgaattgtgaaaagatttacattatccaataaataaacgcaaaattggttgcgtttacttagagcttctaatatgtcgcttgtcacattaagtgtccatattgaaagccatcacttttaacgtacacaagaaaggagatggagttttggaacagcaaaaagtatttgatccgtttcaagcatggaaagacgtatatgacaaaaccgaatcttactggggtaaagttattggggacaatatgaatcgtgaagaattttcccagctcatgggaaatgtgctaaatatgaaccttcaatatcaacaagcagtaaatgaagtaacggggcgctatctgcaccaagtaaatgtaccaacaaaagaagatgtagcaaacgttgcgtcattagtcatcaatgtggaagaaaaagtagaattattagaagagcaatttgacgatcgttttggtgaattagaagcacagcaagaaagtgcatctgctttgaaaaaagatgtaactaagctgaaatctgatgtcaaatcgttagacaaaaaactcgacaaagttttatctcttcttgaagggcagcaaaaaacacaagacgagttaaaagaaactattcaaaaacaaattaaaactcaaggtgagcagcttcaggctcagctgttagaaaaacaagaaaaattagctgaaaagccaaaggcagaagctaaatctgaagcaaaaccatcaaacgctcaaaaaactgagcagccagctcgcaagtaaggtataggggattttataacaacattaactgctgtatttacagtaaaaatcatcgctgaagaagcaagggggaaatttttcatgacaacattacaaggtaaagtagcaatcgtaacaggcggatctaaaggtatcggggtagcaattacacgtgagcttgcttctaatggagtaaaagtagcagtaaactataacagcagtaaagaatctgcagaagcaattgtaaaagaaattaaagacaacggcggagaagctattgcggttcaagctgacgtgtcttatgtagatcaagcaaaacacctaatcgaagaaacaaaagctgcgtttggtcaattagacattctagtaaacaatgctggaattacgcgcgaccgttcattcaagaagttaggtgaagaagattggaaaaaagtaattgatgtaaacttacatagcgtatacaacacaacatcagctgcgctaacgcaccttttagaatctgaaggcggtcgtgttatcaatatttcatcaattattggtcaagcgggcggatttggtcaaacaaactactcagctgctaaagcaggtatgctaggattcactaaatcattagctcttgaactagctaagtcaggcgtaacggttaatgcaatttgcccaggatttattgagacggaaatggtaatggcaatgccggaagaagttcgtgcaaaagttgtagcaaaaatcccaactcgtcgcttaggccacgctgaagaaattgcacgtggagttgtttacttagcaaaagacggcgcgtacattacaggacaacagttaaacattaacggcggcttatacatgtaataaatgctggccctgacttttgtcggggctgtgcttgttaactaactactaatggaatgaaagggtgtgtatattcgtggcaattccttacgtgcaagagtgggaaaaattaatcaaatcaatgccaagtgaatataaaagttctgcaagacgttttaagcgtgcatatgaaattatgacagcagaagcggaaccggaagttggattaacaccaaaagaggttatttggaaaaagaacaaagcaaaattataccgctatacgccagtaaaagataacctgcataaaacaccaatcttactcgtatatgcattgatcaataaaccgtatattttggatttaacacctggaaacagccttgttgaatacttattaaaccgtggttttgacgtgtatttgcttgactggggaactccagggcttgaagacagcaatatgaagctagatgattatattgtagattatattccaaaagcggcgaaaaaggtgctgcgcacttctaaatctcctgatttgtctgttcttggttactgcatgggcggaactatgacatctatttttgctgcattaaatgaagacttgccgattaaaaacttaatttttatgacaagtccatttgatttttcggatacaggtttatacggagcattcctagacgatcgctactttaatttagataaagcagtagatacattcggaaacatccctccagagatgattgactttggaaacaagatgttaaagccaatcacgaatttctatggcccatatgtaacgttggtggaccgttcggaaaatcagcggtttgttgaaagctggaagctaatgcaaaagtgggttgctgacggaatcccatttgctggtgaagcttatcgtcagtggattcgtgacttctatcaacaaaataaattaatcaatggtgaacttgaagttcgcggacgcaaagtagatttgaaaaatattaaagctaatattttaaacattgctgctagccgtgatcatattgcgatgccgcatcaagtggcagctttaatggacgctgtttcaagtgaagataaagagtacaaattgttgcaaacaggtcacgtatctgttgtatttggtccaaaagcagtgaaggaaacatatccttcaatcggcgattggctagaaaaacgctctaaataaaataaagaagcggctgggacaaaagtattttagccgaagtgaaaaacgaaccactgatattagtggttcgtttttttgttatggtaaacgtaggttttaaatatatagttgcttctagctgttgattggagggtaaggcgaagactcctgcgggaaaagcggaacaggtgagaccccgcaggagtgtcagcgacgaggaggttcacgggccgcccgcggaaagcgaagtcttgcacggaaatcaacagcgatgtcacaagcggttcagcacatgtatcccatttgttcgtctttagattggattcatttaattatgtctcaacctcgttttttttgtaaacagacaatattgattgacggttctttatgcgggctgctggaatatatgatatctaatgacaagtgaggtgacttcttttatactaatgtagtcaccttcttgaacatgggattttttacatggatattgcaatccgtgtaacaatgagtatgctttgagaagaaagaagaaaactattagtattataacaaaaaaggaatgtcagattatgccgcaaccatggaaacgacgagtaaggcagatgtcttcagctcaaattattgttacattttacatagtggctgttacgcttggatttctattacttagtattccagaagctttaaagccgggagtgaagttagcatttattgatcgcttatttattgccgttagtgcggtaagtgtaacagggctgacacctgtctctactccggatacatttagtacaacgggctattttttgctcgcttttatttttcaaatcggtggtattggtgtaatgacactcagtacatttatttggatgattttgggtaaaaaaatcggtttaaaggaacgtcagctcattatgacagaccataaccaatcccgcttatcaggattagttgacttgatgagaaatattttatttattatttttgccattgaactagttggcgccattgttttaggattacattttctccgttattattcgagctggacagatgcatttttgcatggtttctttgcttctgtcagcgctacaacaaatgctggcttcgatattacaggatcttcatttattccgtatgcccatgattattttgtccaagtggtaaccgttattttaattacgcttggagcgattggattccctgtattaattgaaattaagcactattttttaacatttaaagataagcgtaaatttcaattttcgctatttacgaagctaacgaccattatgttttttctgctgttagcagggggaacaatcttgattcttgtgctagagcattcaggatttctagcagataagtcttgggatgaatcgtttttttatgcatttttccaatctgctgccacaaggagcggaggagtagcgaccatgaatattaatgagttttcacttcctacgttaattatgatgagtgcgatgatgtttatcggtgcttcaccgagttcagtagggggaggaattcgtacgacgacgtttgcattaaatattcttttcctgttttattatgtcagaggaaataagacgattaaaatctttcgccgcgaaattcatgaagatgacattattaaatcagtagctgtatcgatgttagccgtaatcatttgctcgatttctcttcttattttaagtattacagaacatttttctctcattgagcttatttttgaagtgtgttcagcttttgggacaacaggtttatcaatgggaattacgggagggctttcggatatcggcaaatgcgttattatgattttaatgtttattggccgaatcggcatgttttcatttattttaatgcttcgccgtccaacgtctggaccggattatcactatccgaaagaacgtattattattggataaaagaggctgaggtaaaaatatgttagttgaagaagaatccgaacgagcttaattcttaatcaagctcgttcggatttttttatgatggtaaacataggtctcatatgtttagctgcttccagctgttgattggagggtaaggcgaagacgcctgcgggaaaagcggaacaggtgagaccccgcaggagcataagcgacgaggaggctcaccgaccgcctgcggaaagcgaagctttgcacggaaatcaacagcggtgtcacaagcggttcagatgaactcatttatcccatttgtttgtctttagattaaagtaatttcgttatgtttcaaccgcttttttacagctttttctgcttatattacgcatcagaaagtgcattctaagaaaaggaagttcaatggacttccaagcataggagggatatatgatggcaaagcgtaaagtaggttacaaatcagcactgactaacaataatacaccaaaagagagcctttcagatgcagaatttgctgctgaatatgctggcggcgaggagccggctaaaggcgcgaatcgcaattcgaaaaaaggaaagcaaggtaagtaacgatgagcaaacataaacaaaataataagcatatcgcaagcactgaagcgaagcaaaaacagttactgcaagaagagttcggagcggaaatgggcgatcccaacgcagctaaaatatatgaatccctaggaaagacaaagtctgataaagagcatgaaaagaaaaaagaatgttaaagaaaaaaacctcggatatccgaggttttagcttacaactggaaggccaaatgcctctacaggtgctgaataaagttttgtatcatttgctttttgatcataataagcaagaagaacagatggttgttcatttatttttcccgtttgtttataatacatatagtcaaatggaagaatctctaaaacagtgtgcttgtataattctttttcagcaagctgttcagcttcaaaagcctgtcccatgatagaaggattagcaagcatttgctgatagtaatgagagcggacttgtttttctactttatcgtcccaccaaggtttacgaggcttatgcttttggttttgtaaataatcaattttcataaacccttcaatcatttcttcatttgaaaaattctctgtttcaatgtactgtctaaggcgtttgaataaatcttcaagctgatggccgattcgaacccagcccatttcatcccaatacgtcccgaagttttggaagaaatcaaaaggtgtatcatagcagtgctctactaaaaactctattgtttcatccattcgatggtcattccaaaacttttctaaaatatcttctacatgtttaatgcgtacgacatctgaaaatggcaagacgttattgcttaaaatttcataaggcgactgatccatgtattgataattatagtgaggcgcacttaagcgtaagcctgtgccgcgaagcatttttaaaaagcctagctgaagctcttcagggcgaagtgcaaatacatcattaaacgtattcttaaatgagttataatcttcgtctggcagtcccgcgattaaatctaaatgctgatcgatctttccgccttcttttaccattgttacggtacgcgttaactttttaaagttttgtttgcgtttgactagttcattgacagcatcatttgtagattgaacgccaatttcaaagcggaataatccttttggcgcattatcatttaagaactgaataacttctgggcgcataatatcggcagtaatttcaaattgaaatacggtaccttcacgatgttcatcaattaaaaattggaacatttccatggcgtagctgcggctgatgttgaatgtgcggtctacgaacttaatcgtgcgcgctccgttatccatcaaatagcgaatatcttcttttaccttttctctatcgaaatagcgaacgcctacttcaatagaagagagacagaactgacagctaaacggacagccgcggcttgtttcaatatatacaacgcgttttgaaagttcttgacggtcttcttcaaaacggaaaggagaaggcatttcgcgcagatcaattttattgcgctgcgggtttacaactggttttccttcttttcggaaagccacgccgcttacgttttcaaactggcgctctccgtgaagttcgtccaacagctgcttgaatgtttcttctccttcaccgatcgcgataaagtcagcttcaggaatacgctctagccagtgagttacatcataggttacttctggtccaccgaatataatgatgagctcgggattgatcttttttagcatttgtgcgactttaatcgtttcttcaatattccaaatgtaacagctgaaaccaacaatatctgggttgcgtttatataaatccgtgacaatgttcatagcaggatctttaatcgtatattcggccatatccactttatagtcaggctcggcataggcttttaaacatcgaagcgctaaagaagtatggatatacttcgcattcaatgtactgacaacaatgttcattcaaaaagctccttttaactcgtaatatgaaatcaatttactattttagcacatttgagaaataaagtataaataccttgccacttttgttgtggaggggaaaggatttcggtaaaatgtaacagaaacgtaaaagaagaaagagtctcggttaatgtaaaccttggtgaacgaaaaaaatgaggtggaaaacgtggaatataagcgaattaagccaaaaaaaatatacgaagaagtagctgaaacgcttcttgagaatataaaagaaggcagcttaaagcctggtgaccgtttggattcagtgcagcagctggcggaaaactttcaggtagggcgctcagctattcgtgaagctcttagcgctttgcgggcgatggggcttctggagatgaagcaaggagaaggcacatttgtacgcgaatttaactctgatatgctgtctttgcctgtaactagcgctgtattaatgaataaaaatgatattgaatatttgcttgaagtgagaaaagtattagaaattggagctgttcgagcggcagctcaaaagagaacagatgcggaccttaaacaactgtctgatagcctggagcaaatgaaaggagcgtttggcaatgaagagctgggagagaaagcagattttgcttttcatttagccattgccaaagcctcgcaaaaccctcttttagtgaagcttatgaataacgtatcagaaatgatgattgaaacgatgaaagagacaagacgcatctggctttatgcggaagaaaaaacggctgaacggatttataaagagcatcagcaaatttatgaagctattctttctcagcatgcagaagacgctcagcattttatgatgagtcatcttgataatgttgaacacgtgttaatgaaatacataccagaagaaaaataatgccatttcaggtagaaaagtgtgcaccaaataacagaaaaactaaaattcaagcaccttccgataatttatgcttgctctattgtgaaaagatttacataatagaaactaggattgtcaaatggagggttacaaagtatgaaaaagcaatatagagatgatagtttagctttgcatacagatttatatgaactgaatatggcacatacgtattttaaagaccatattcataaacgccgttctgtatttgaagcttactttcgtcggatgccgtttgaaagcggttatgctgtgtttgccgggctagaaagagtaattgattttattgctaatttcagatttagcgaaacggacttagattatttatatgaagaattgcattatgaagcggagtttatcgactatttaaagcaagttcgctttagcggtaatgttcgttcggttgtagaaggcgaaatgatttttgctaacgaaccgatgctgcaaattgacgctcctttagcgcaagcgcagcttattgaaacgccgcttttaaatattttaaatttccacccgctgattgcgacaaaagcatcgcgtattcgcctggccgcgggagaagataatttatatgagcatacgggtacgaatcagcttatggaatttggctcaagaagagcacacgagatggatgctgcattttacggagcgagagctgcttatattggaggctttgatgcaaccagtaatgtcagagcggggaaagtatttggaattcctgtgtccggcactcatgctcacgcgcttgttcaagtctatcgtgatgagtacagcgcgtttaaaaagtatgcggaatcacaccgtaactgtatctttttagtagatacatataatacgttaaaatcaggtattcccaatgctattaaagtagcaaatgaaatgggagatcgcattaattttatcggtattcgattagatagcggaagacttccatatctttctcaagaggcaagaaaaatgcttgatgaagccggctatcatgatgtgaaaatttttgcttcgaatgatctcgatgagtacagcattctagatttgaaagcgcaaggtgccaaaattgatggatggggagttggaacaaaactcatgacatcttttgatcagcctgcgctaggagcggtgtacaagctggtttcgattgaagatgatcatggaaacatggtggatacgattaaactgtcagagaatccagaaaaaatttccactcctggtttaaaagaggtataccgaattgtaaatcaagtgaaccacaaatgggaaggcgattatattacgatgcaagacgaaatgccgaatgaagagcagcatttaaaaatgtttcatcctattcatacgcacgtcagcaagtttgtcacgaactttaacgcacgtaaaattcaccagccaatctttacagacggcaagcttgtgtacgagcagcctaccattgaagaaatgagagcctactgcttacagaacttaaagcatctatgggatgactacaaagtcattacaaaatcgaacgaagatgtattccgtcctacagagtatccggtagacttgagtacaaactgctgggataacaaaatgcaaaatattgaagagactagaagcaagttactatctgataccgtacttgtgtagattccgtcagctagtaatgagaggagagtttttttatgaaagagctacaaaagcaaattattgaagaaatgcacgtccaaaaagaaattaatcccgtggaagaaattcgccgcagcgttgattttctgaaatcctacatgaacaaatatccgtttttacgttcgtttgtactaggtatttccggcggccaagattctacgttaactggaaagctggcgcagctagcggttaatgagttgaacgaagaagcgggagaagagcgctatcagtttattgctgttcgtcttccatacggtgtgcaagcagatgaagcagactgtcaagatgcacttgcttttattcaaccaacaaaatctatttctattaacgtaaaaccagcagtagatgctatgctttctgctgttgaagaagcggcagatgataaagtttccgacttcaacaaaggaaatgtaaaagcgcgtgaacgaatgattgcgcaatatacggtagcgggcatgtacagtggagtcgtactcggaacagatcactctgctgaagctgttacaggattttatacaaaattcggtgacggaggagctgacttagtacctattttccgtctgaacaagcgacaaggaaaacaaatgctaaaaaaattaggctgtcccgagcatctatatatgaaaaaaccaacggctgatttggaagaagatcgtccacagcttccggatgaagaagcgcttggcgtaacgtatgagcaaatcgacgattatttagaaggcaaagatgtaggtgaacatgcaagtaacgtcattgaaggtcacttcttaaaaacgcagcataaacgccaattgccaatcacagtatttgatgatttttggaaataaataagtaagaagctaagacaaaagtagtttagttaaaggaagatctgaccggtgaagattcttgatagagaatcttcaccggtcggatttttttaatgttatggcaaacgtaggtttcacgtatcccaatttcttattttttatgaaaaaaagatagcaaacaaagaaaggtattttcgaaaaactagtgaaattagaaaaacataggagtataatagcattaagtcatctgatgacctgttaactaaaagaagtaaaatgatcagcttggagggagcaaatgatgaaagtatctttatttgccacatgtttgattgatatgtttcaaacaaatgtaggaaaagcgacggtagaattgttagaacgattaggatgcgaagtggattttccaaagagtcaagtttgctgcggacagcctgcatataacagcggttacgtaaaagaatcaaaagaagcgatgaaaaacatgataaaagcgtttgaacatgcagagtacgttatatctccgtctggctcgtgtgtgacaatgttcaaagagtatccccatctttttaaaggtgatactgcatggcatgaacctgccgtgaagcttgctgataaaacgtatgagctaacagattttattgtaaacgttttaaaagtggaagatgtaggagccagtttaaatggtaaagccacttatcattcttcttgtcatatgacgcgtttgctaaacgtaaaaaaagaaccttttacactattaaacaatgtaaagggtcttgaaatggaaaaccttgaaaacagtcataactgctgcggattcggcgggacgttttcggttaaaatggggcaaatctctgaacaaatggtcgatgaaaaagtgagctgtatagctaagacaaacgcagagtacttaattggagctgactgcggctgtcttatgaatattggaggaagaattgaacgaaaaggacagcctgtaaaagtgatgcatatcgctgaagtgttaaatagcagaatgtaaagaaaggagaataccgaatgtctatgaaaataggaaacgatcagtttaaaaaacgcgtcgatgatggagtcaataatgcgtttatgcgctttgcggtttcaggtgctcaagagcgcttaagaagccgtagattagatgcggcagaagagttaggaaactgggaagaatggagagcgcttggcgaagaaattcgtcagcatacgcttgaaaatttagattattatttagagcagctcactgataatgtagctaaacgcggaggccacatttttttcgctcaaacagctgaagaagcgaatgagtacataaaaaatgtagcgaagcaaaaacaggcaaagaaagtggttaaatccaagtcaatggttacagaagaaattcatatgaacgctgctttagaagaactaggctgtgaagttattgaaacggacttaggagaatatatcctgcaagtagatgatcacgatccgccttctcatatcgtagctcctgcgcttcataaaaataaagaacaaattagagatgtgtttcaggaaaagctttcttataaaaagacagaaaaacctgaagaactagctcttcatgcccgggaaatgctgagaaaagaatttttatcagcagatattggcatcacaggatgtaattttgcgattgcagaatctggatctatttcacttgtaaccaatgaaggaaatgcaaggttaacaacagcccttcctaaaacgcaaattacggttatgggaatggaaagaattgtgccaacgtttgaagaatttgaagtgttggtaagcctgttaactagaagtgcagtaggtcagcggcttacaagttacgtaacagcgcttacaggacctagacttcctggagaagtagatggaccggaagagtttcacctagtaattgtggataacggacgatctgcgattttaggaactgaatttcaatctgttttacagtgtattcgctgtgcggcatgtgtgaatgtatgtcccgtgtatcgccatattggaggacattcatatggatctatttattcaggtccgattggagctgtattatctcctttacttggaggctatgaagactacaaagagcttccatatgcctcaacgctatgcgcagcctgtacagatgcctgtccggtcaaaattccgctgcatgagctattgcacaagcatcgtcagcgaattgtcgaaaaagaaggaaaagcacctatttcggaaaagctggcgatgaaagcatttggcttgggagcagcttcttcttctctatatacagtgggcgctaaagtagcaccggcagctcttactccttttatgtcaggaagcagtatttccaaagggcctggtccattaaaagcgtggacggaaagcagagagtttccggcgcctacaaaagagcgcttacgagattggtttgataaaaggagtgatgaggatgaacggaagcattcaaaatagagacagttttttagacaatattgctgctaatcttaagcgaagcaggcgaacaagcggcgtagtaaagccacaatggaagcatgctcctcagcatgaggtctaccgcagctattcgccagatcaattaaagaaagagcttgaaaaccattgcgaacgtattcatactcgctatgtagaaacatcatcacaacacttgccagctgtccttgaggaagccgtagcgaactatggaaatggtcttgtctgcacgtggaatgatcctaggttttccgaatatggattgaatctgctgatggagaaatgggaaacaagcagtagccttcatgtatggaattctggaaaaggcgatgagaatattcaactagctgaacaagcaaatgttggcattaccttcagtgatttgacgctagcggaatccggcacagttgttttgttcagtagcgctgaaaaaggacgatcggtaagcttgctgcccgccacttatattgcaatcatacctcaaagctcaattgttcctcgcatgacacaagccgctgaaatgattcatgaaaaagtagagcgaggagaaaagattgcttcttgcattaactttattacgggaccgagcaattcagctgatattgaaatgaatttagtagttggtgtgcatgggcctattcaagcaacttatattgtagtgaatgatcgatgaggctgtgacaaacgtattttagcccaagtgaaaaacgaaccattactcaacgtgtttgagtaatggttcgttttctttgttatggtgagcgtaggtttcatccgtttcgttccttctagcagttgattggaaggcaaagcgaagactcctgcggaaagaaaagacttgtacggaaatcaacagcggtgtaacaagcggttcagctcatgtatccaatttgtttgtctttagattagattgatttagttatgagcctcttttatttatgctttctttctaaatagcgggataatgtgaagaaatgtcgtattttgaataaacgtgcctaattttaaaaaggtaaaaagcaaatcttgtagaatattaagtctatagataaaaggtggggaaatgggaagtgcaaaagaaaggagcaatgagcatgtcaccacacagagaattaacatctgaagctgagcaaaagcagcaaggtgaattacagcagctacgagctatttttaatgacgtattagatgccattgtcgtatttgatgagtattttcaagttataaatgcaaatgaatcagcctgcgggctgtttgaaaaaacaaaggatgagctattaacgtatcaaatgaaagattttctgatgtattttccgtatgacatgattgaagcgtattatccagcactcttagaagaaagctatttcaaatatgaaggcgcgatgacgcttcgaagcggcatgatgaaacatgttgaatttacttcacacaaacatagtcacatgtcgggcattattgtgtgtacatttcgggatattacgcagcacaaaatgatggaaaatgaacggtttattagtcatcatatgtttatggatgtatttaatgaagcggtagacggaattgtcatttttgatcgaacgggtcagcttatcgacgcgaacccttcattttgcgaacgattaaattatacaagagcacagcttctaaccaaaacattagaagagcttgtagaacctacttatcattataaggtgaaaaaattatggagaactctgcatcaagaaggaaagacaagcggtgagctaccgatcaggctcgaaaatggagacgttactttttttgaatttaccacaacggctaatatatacagtcaatactatatgtccattatgagagacgtgacggaaaaacggctgatggagcagcagctgttgagaagcgaaaaaaatttcagggctatttttgaaaatgcgattgaagcgatcttgatttggagagatgatggtgaaatcttgaacgctaatcttgcttcttcgcgtacatttgagctgccgttaaacaaattaattggaagtaatttgtatacatttatcgatacaaaaagctttagtgcgttaaaggtgctccaaacgtttcaaacaaaaggagaaattcgcaatcagcttcctttttacatgccaaatggagaaatcaaacagttggaattcacagggaaaaaaggcattatagaaggagaccatttaacgatttttcgaaacatcagtgaacgtacaaaaatcgaacaggagcttcggaataacgaagagaaattcagacagatttttaatggttcgatcgatgggttagttttatgggacggcaagcgaaatattattgatgtaaattcttctctttgtgatattctagaactcagcaaagaggagatttgtgcgcactccatggaggattttatttcttcagcgaatttggatgcggtcattgagcataaagaaacgattgagcaaaaaggggaagctgaaggagagattacgtacgttacggggaacgaaaaagttaaaaatatcgaattttccacgaaaaaagatatcttaccaggtctatatatgacgcttttaagagacgtaacggaacgaaatcaaatgcaagagcagattcgaaaatcggatacgcttcaagtagtcggacagttagcagctgggattgcgcatgaaatccgcaacccgatgacagctttaaaagggtttgttcagctgttagaaagcagcattcaagaagaccactctctttattttgatattattaaatctgaattaaaaagaattgaaaccattattacagagtttctcgtactcgctaagccacaggccgtaaagtttgaaaagaaaaatctagctgcggttgttaaagaaacgattgatttattaaatgctcaagcgcttttagaaaatattcagtttgaactaagtgtgtctcctcagctgccaatggtgtactgcgagccgaaccagattaagcaagtactaataaatgtcattaaaaatgcaattgaagtcacgtcaaacggaggaagaattattgttgaagtctactctacagagccgcactacgtgacggtctccattcgagatcaaggggatggaatgcccgaagagcgcatcaagcgcttaggagaaccattttatacgacaaaagaaaaaggaacgggactcggtttgatggtctcatataaaattatcgaagaacataaagggcgaattgaagtggaaagcaaaataggagaaggcacagcttttcatgttattcttccagcttaattagaaaggataaaaaaatatgtactacggagaaatgaatttattttctgatttgaaaatttatattgtagcctcggaaacaggggttcaacatatttggtttgatagcgatgatcataatgagcagcttaaagaacttgtccatgacgagaattatcaccatgtgaaagaagcgaagcgacagctgcaggattatgctgaagggcgcacgctaacatttgatttgcctttggatataaaaggaacagactttcaaaaagaagtgtggctaacgcttaaaggtataccttatggacaaacgtggtcttatagtgatgtagcggattctgttaatcgctctaaagccgtaagggctgtgggacaagcgaatcgtcgaaatccactgcctattattttaccttgtcaccgtgtgattggaaaaaatggagctttaacaggttatgcaggctcccaaactcatataaaagagaaactattaatgcttgaaagaaatgtagcaaaaggcgctctggagttaaaataactattcaccgtccaatttccagccttctccctgcacaaaaacaccgtcaatttgctgaggagaagggagggaatttagttcttcatctttggataaatcgaatagctgatagtgctgcttacgattcaacgctttgtttttatccgttttttgctctgaactcatatttactcccccttattcaaaaagaatcccctataatatatgtagaaaaagaagagagtactgttacaattgtgttacaaatgcagttgaaaaccagtgctcaataaaaaaaagccgcatagcagcggctttttttattgagcagattgcagcaaaactttttgaatggattccaaagacggggaatggataattccatgctctgtaataatggccgtaatcagttcgcttggcgtcacatcaaaagctggattgtacacagagattccgtctggagcaatttgtgtatctccaatgtgcgttacttctttaggtgaacgttcttcaatagggatgctgctgccgtcttgaatagataaatcaaatgtggactgcggcgctgctacgtaaaatggaataccgaatgctttcgctaaaagagcaagtccatatgttccaattttgttagccgtatcgccatttgctgcaatgcggtcagcacctacaataatcccattaattccttttgttttaatggtatgagcggccatattatccgtaatcagcgtcacgtccactcccgactgctgaagttcccaggctgttaagcgagaaccttgaagaacgggtcttgtttcacaggcaaatacttcaagcggaatatcacgctgcttagacaagtgaaaaggtgctaaggctgttccataataagctgtagcaattgaaccagcattacatattgtcatgattttatccttctttttaaataaagaaagagcatgatccccaattcggtagcacgtttcttcatcttctacttgaatttgaatagcttcatgaacaacttttgttttagcttcattaacggaagaagcggattcagcgcttttcgctacgcgctccaatgcccaaaataaattgacggcagtagggcgtgagctagctaaatactgttgatcaagagctagctttttgttaaattccttgactgaatctgtgtcatagctaagcgcagaaagagcaagaccaaaagccgccgtaatgccaattgcaggggctccgcgtactttcaaggtagtgatagcatcccatacgtctttaatggtttgcagcttaatatattcaacgttgccaggaagctgctgctgatctaataaagtaatatatgattcattccattccactgagcgcggaagtgatagtgtatttgtcatgctgataccgatcctttcattgtgtacattattcgttatcgaagtaaatgttcaaattcatttggtgaaacgtcttgttggtgcagaagcaaatagcgtccaatttttaacgcagtacgtttagcgttaatttttctttcctctgaagaaatttcgtctaagtccgccacgtgagctaagccaatcgtacgtcgaatgatttcacatcctgcatatccaacagcatcttgccacgtttgcgttaaaatttcatgtaataagcgctcatctttagcgaaaggttcagtgttttcagcatgccaaagcgcagtaaaggtatctttgaatacgttccatgtgttcgtaatgtgtgcaaataacggttcgcgatttgtttctcgagaaagagcgtttaaaaataaattcgcaacaaattgccctaaatcgaatccaaacggaccgtaaaaagcaaactctggatcaatcactttcgtttcttgactgctagcaaagatgctgcctgtatgtaaatcaccgtggattagcgtttgcgcatttgttaaaaatttatattttaattttgctgcttgtagctttacatcaccatcattccacaattcttctacatcaggacgcagcgctttttcaaattcatttgtatcaatatcaaaaaaaggatctgtaaaaactaaatcttccgtaatattgcataagtcggggttgctgtacttaacaacttcttcttttttatcctgaggttttaaggcgaaatcagacgttttgaacgcaatatgtcctaaaaaagaaccgatatgctgtgagatcagaggataactttcaccttgaataagtccggcgcgagaaatcgttaaatgagacaggtcttccatgaccgtaacagcaagcgtttcatcgtggtaataaacagcgggcacaagttctggcgtaaatgcaccgaattgcttgagcgcattgctttcaattgtggcacggttcaaggatagaggccagctttcgcctacaacttttgcatagggaagcgcttgtttgacgataatggatttattggtttgatcatttatgatgtgaaagacgagatttaagttgccgtcaccaatttcacgggcagtcagtgcttctgtggcatcaaaaagacctagctttttcacaagtttgattgctgaaatttctgttaaagggtgatacttctctgtttttgttgttgacatcggaatccctccatagtttattaaactgatttgtttactaagttaataggtttaagaatatatggaggcttttataattttagaaaatataaaagcctctttcgttagaaagaggcttgattgtagtgttcaaacctcttatctgccagaaaaaattactttctgttggaattagcaccgtgcctttgtaaaacatgttttacgggtgtgatccatcttaggatggaatgacggtcggttgctgggcttcacagggccaaatccctcagccaactcttgataagagtgcgattacttattcaattttgatttgtttgaatattttatgatatctggtgaaaatcgtatcatgcaaaaaaacggctgtcaatacataattaataaaattctgtacggcgatctgtaaagacgggaatttgtttacgaatttcttttacaagttccaggttaacgtcagcacttaaaagttcttcgctatcgccagcttcagcgattatttctccccacggatcgatgactaaggaatgtccggcaaatgtgttattaggatcttggcctacacgattacatgcgattacatagcattgattttcgattgcacggctaatgagcagggctttccagtgggcaagtcttggagccggccactgagcgacaacaaacaagacttctgctccgctgctagtatgaacccgtatccattctgggaaacgaatatcgtaacaaataactcctgcgcacagtgactgttcaagtgtaaaaaggttttttgctgttcctgcttctaaatacaggtgttcatccattaatttaaataagtgcagtttactgtattgtgatacttcacgaccttttcggtcaaaaatatacatcgtattcgtgacgccttgctctgtttttttcgcgatcgaacctcccacaatatttactgcgttcgttttagcaaactgagagattaattgcttggcttgctgcccttcatcatctgcaatttcgtctagccgcgtcaaatcataggctgtatcccatagctcaggaagcacaaggatatcagggttttctttcagggcttccgtcatcttttgttcgatatattttcggtttttagttgggtttccaaacgcaatatcaagctgcaaacacgtaatttttacactcactttatcatccgtcctttttttagtagttgaaaaaaatgactttacaagttgagtattacaatatattatttgtgactagaatttcaagaattttttgagaaggtgtgcgatgatgaaacaatttgagcaatcggaactattaaaaagtttaccaaaacaattttttgcatcacttgtgggcaaggtaggaaaagtaatggcccaagggcacgacgttattaacttagggcagggaaatcctgatcagcctactccttcacatattgtagaaacactgcaaaaagcaagtgctaatcctatgcatcataaatattctccatttcgggggcaccagtttttaaaagaggccgttgcgactttttataaacgagaatatggcgttgatgtggatcctgaaaaagaagtagctattttatttggcggaaagggtggacttgttgaaatcccgcagtgcttgttaaatcctggagatacggtgctggttccagatcctggatatcctgactactggtctggagtagagcttgcaaaagccaagatggaagtgatgcctctcacggctgaaaatcattttctacccgtatacgaagagataagtgaacgtgctaaagaacaggcaaagctcatgtttttaaactatccgaataatcctactggtgcagtggcaacggcagaattttttgaagacaccgtggcgtttgctgccaagcacgatatttgtgtggtacacgactttgcttacggagcaattgggtttgatggtaaaaagccaatcagttttttacagactcctggtgcaaaagagacgggaattgaaatttatactctttctaaaacgtataacatggcgggatggcgagttggatttgctgtaggaaatgaaagtgtagtagaagctattaatcttcttcaagatcatatgtatgtcagtctctttggggccgttcaagaggcagcagccgcagctctgttggaatctcaacaatgtgtgaatgatttagttaagcgctatgaatctagacgcaatacctttattcaagggcttcgagaaattggttgggatgttacatctccagcaggctccttttttgcatggctaaaagttcctgaaggatatacttccgaacagttttcagatttactccttgaaaaagcccacgttgtggttgctcctggtgtaggctttggaacatatggtgaaggctatgtgcgcgtaggattgctgacggatgaagagcgcatgagagaagctgtatctcgaataaaaaaattaaatttattttaaaaacgcattgacaatcctttttgagttggcttaatatgtaagaagttaacgagattaataaccgataaatcctagcggtattttttatttagtatataatctacgaattcaatttaaataaatagcaactttcttattaagagtaggtggagggactagcccgatgaagcccggcaaccgacttaacgcatgttaagcacggtgctaattcttgcagcagcagctgagagataagaagagcaacgaaagcctcttcttaatcacagaagaggttttttttattaacgatattaaacagcaagggagtttttagcataatgagcgaaatcgttgcaagctacttactacatgataataaaggaaattttcataaaaaagcggaaggaatcgctttaggactaaccgtcggctcatggacagatctgccgcttttagatcagcagcagcttcaaaagcataaagggcgcgtcgtgtccgtaactgagcttcaagattgcgaacgtgtaaacggatatttaggcggagaaattaagcaggctattgtcaaaattgcttatccaactgccaacttttcaagagatttaccggctattttagttacagttttcggaaaactatcacttgatggaaaagtgaaattattagacttggattttcctgatgaattattagctgaattcccaggaccacgctttggaatagaaggtatccgagagaaactaggcgtttatgaccgtccgcttgtgatgagtatttttaaaggcgtgattggaagagatatgacgtacttaacaactcagctgcgtgagcaagcgcttggcggagtggatttggttaaagacgacgagattttgtttgatagtgaacgaacaccttttgaagctcgcgttacagaaggaaaaaaagtactgaatgaagtatacgaaaaaacgggacaccgcacgctgtatgctgttaatttaacgggacgaacgtttgagttaaaagaaaaagcgagaaaagcagctgagctaggagccgatgctcttttattcaacgtatttgcttacgggttagacgtactgcaggcacttcgagaagatgatgaaattaacttgccgattatggcacacccagctgttagcggagcgcttacgccgtcagagttttacggtttttcaaattcattgctgcttggaaagctattgcgtttagccggagcagatttctcactgtttccatcaccatacggaagcgtagcgctttctcttgaagatacgacaggcattgcctacgaattaacgcgtcctgtatacaaatataagcagtctttcccggttccttcagcaggaattcatcctggaatggtaccgcagcttgtgaaggactttggaatcgacagcattattaatgcaggaggcggagttcacggtcatccagacggagctatcggaggaggaaaagcattccgtgcggcgatagatgcagtactctctcatcaaacactagccgaaaaagctgaagaatcaaaagagttgcaaaaagctttgcaactatggggaacagtagaggtgaaagcatgacatcgttaaaaatcttttgtgactttgatggaacaattacaaatagcgataacattattgctattatgaaacaatttgctcctccggagtgggaaagtattaaagacgacgtgttggcacagcgcgtctccattcaagaaggagttgggcaaatgtttgccttgctccccgtggaattaaaagaagatattatttcttatattttagagacatctgctattcgagatggatttgatgattttattgcctatacaaaagagcaccatattccgctttatattgtaagcggaggaattgacttttttgtaaaaccacttttgggaaatcgagttgcagaggaaatgctctactgcaacggatctgatttttccggtgagcatatttccattacgtggcctcatacatgtgataaacagtgtacaaatgactgcggctgctgtaagccaacgattattcgccatcttgcagatgaaagagatcatacggttgttattggcgattcaattacggatttgcaggctgccaaattagctgatacggtcattgcacgtgactttttaattgaaaaatgtgaagagctatctctaccgtatcgtcctttttctactttttatgatgtaattcatcatttacaagaattaacagaagaggtgaaagcatgagtatcatggctcagcaaaggttgcatgagcttgcggatataaaagatgagttggcagagcgcgattggttcttcggtacaagcggaaacttagcgattaaagtggaccaaaatccgacaactttctttgtatcagcaagtggaaaagacaaaagaaaacgtacaaatgaagattttttattagttgatcaatatggaaagcctgcagaagacacgcatttaaagccttctgctgaaacgcttttacacgttaagatttacgatttaacgaatgctgggtgcagtcttcatgtacatacaatcgacaacaacgtgatctccgaactgtacggagatgaaggcgttatttcattcaagggtcaagaaattattaaggcgctagggatttgggaagaagatgcggaaattactgttccgattattccgaattacgcagatattccgacactagcagaagagttttctcatcatataaaaggcgatcaaggcgcgattttgattcgtaaccatgggattacggtatggggaaaaaatgcatttgaaacaaaaaaagcgctagaagcctatgaatttctatttagctaccacgtcaaattactgtcacttaaaggcattaagctaaaggtgcatttataaaaggaggaaacaacaatggcgcacattcgcttacatgtaaacaataaaagaattgaaactcaagaggaagtatcagcttttctggcaaacaatgaagttatttatgaaaactgggacattacaaaacttccagaaaatcttcgtgaaaaatatgatttaactgatgaagaaaaaacagaaattttaaacgcttttggtgaggatattaaagatatttcgaaacgccgcggctataaagctcaagatgttatctcgttatcggaatctacaccaaatattgatgaattgttaaaaaactttcagcgcaagcatattcacacagatgacgaagttcgctttattgtaagcggtcatggaatctttgttattcaaggaaaagacggcgaattttttgatgttgaattagagccgggcgatttaatttcagtaccagaaaacattcttcattactttacattaatggaagatcgcaaagtagtcgctgtccgaattttcgtgacaactgaaggatgggtacctatttacgcataacaactacttgtaaagcataggtcatcatcaccccgcttttacatctaaaagcggggtattctttggattattataaaactaactatttttatatgaataataagtttaatgggaggaacatcatgaaaaagagtaaaaaaatgctgtggccacttactttgcttgtgcttctaatctttgcgctgactgcctgcacgaaagaacagccaagtctaaacgagaaagcacaggcagctccagcgcagcaagcggcttctgctaagcctgtacagcaagaaggaaaaaaggttacgaaagatacaaaaattgcgcttatttctgaatttacgtcaggcactcacgctgctcagtacataacaggtgtgacaaaagcggctaaaaaagcaggagtacagctatctgtttctgattcaaacaatgatcaatctaaaatggctgcttatttagacacggctattaaccaaaatgtagatggtattatgattgaccacggccgggctgaaacccttgaacccggcgtgaagcgcgcgattgcaaaagggattccggttattgcaaccgatgtagaactaaaagtagaaggagttacaacaattgaccaagacgattatatgcttgcgctgcaaggtctgaagcaaatgatgcaggacattaacggaaaaggaaacattgtatatgcgtttgttggaggatttgcgccgatggaaaaacgcgacagcatttataaaattatgatgaatcgctatccagatgtaaaacaaattgccacatttggaagcgcaacggacaacacctcattagacacacaaaataaaatggcagctgtgttgaagcagtatccaaataaaggagacattgcggccgtttgggcaccttgggacgaatttgccaaaggagtcacaagagcgattaaagaagcaggacgagacgagattaaagtatacggagtggacttatctgatgaagatctgcaaatgatgcaggcaaaaaacagcccgtggaaagcgtcagctgccgtaaatccagcttcagtaggagaaaagcaagttgatctgcttcttaaaaagatttccggtcaagagatccctcgttattattcctttgatccggttttagtcaaacaaactgatttgcctaatcaaacgattaatatggatcagcttagtcaatacgtagaagaatggggcaaaaaagagtagaagtggagggacagacatgacgaacgagctttcaatgaagaacattacaaaaaactttggttcttttcaagcgctgagcaaagttgattttactgttcaaaaaggggaaattcatgctttattgggagccaatggtgccggtaaaagtacgttaatgaaaatattgtgcggagcttacgacgagtacgaaggaaagatctgcaaagacggaggagaaatctctatttcttctcctaaagaagctaagcgccagggcatcggcattgtacatcaagaagtcgatgtagcgctgattccttcgctgtcagtagctgaaaacattgtgttagacgtacaggcttctaataaaagtaaggcatttgtaaactggaaatctatttataagaaagcggaagaagccctttctttacttggttcttctttatccgttaaaaaaaatgtcattgatctaactctatcagaaaaacagcaggtgcttattgcacgtgcaattgtacagaatgttgattatttaattttggatgaaccaaccgcacctcttagtgtggaagagacgaaacaattgttttctgtgatgagagagctgaagaaaagcggagtaggcattatttatatttcacatcgccttcaagaagtggttgatatttgcgaccgcttaacggtgttaaaggacggacgctatgtagctacaaaagaaacttcacatacatcaattgaagacgtgattacgctcatgctaggaacgtcttctgtaaagcagtgggtcaaaaaatcagtagaatttggaaacgaacttttacatgtagaagcattatctcttccagggcgcctttcgaatatctcttttcatgtaaaagaaggagaagtagtcggtattgcaggacttgtaggagcggggaaaacggagctttgccgaagtctatttggtttagagcaatatgtgagcggcagcgttcggttaaaagacaagaaactaaagttgaataagcagccgtattattatattgcacaaggtctttctcttgttcctgaagaacgaagaaaagaaggaatttttgttcatgaatcgattgccgataacttagttttgccaagtctgtcccgctttacaaagtattcgtttttaaagcgaggaaagatcaaagaaaaagcgcagaaaacgactgggcaagtgggcgtaaagtctcattctatcgagcagtcagttggaacgttaagcggtggaaatcagcaaaaagtagcaatcggaaaatggcttgttacggactctgacgtactgctgtttgatgaaccaactaaaggagttgatgtcggctctaagcgagagatattcgacttaattacaaatcttgtgtcgcagaaaaaaggcgttgtttatgcaacctgtgaatttgaggagctgctaggggtagcggatcgaatttatgttatgtacaacggaaaaatcgtgaaagaattatccaaagaagaagcaactagtgaaaaattattttattatacagcaggaggagtaaaaggatgagtgcggagtatgtaacagaacctgtagcgaaaccaaagagaaaaataagtgttttcgactttttttataaatatgggacagtcttaatgatttttgttattatgattatcttctccattgccacacctaactttttaacaggagaaaacattagtgatatcctgcgctctatttccattgttaccttaatagcgcttggtgtaacgatatcgttaaccgtcaacggactcgatttatctgtagggtctacggcggggttagccactattttatcagcctctatgcttgttttacacagacaagaaattgcagtcgctatcattgttccgattattgcatcgcttgttatcgggttagtaaatgcttttttagtagtgaaagtaaagattcctgatattttagcaactctttcaatgatgttcatcgtacaggggattttattaacgtatacaaaaggctcagctatttataccaatatgcctttaccaggcggagacagagctccgggaatttttattccatctttccttgcactggggcaaggtcatttactaggtattcctgtcccggttatcattatgctgttgactgtgctgcttgttcatatcgttttttcctatacgaagtttgggcgttttttctacgtaacaggagggaacatagaagcagcaagactttcgggtgtaccggttaatcgttaccgtatgtatgcctatatgttttcaggtttgcttgctggaattggaggagtcgttttagctgcccgtattggagtaggagaagtgaacgccggctcaccatttttaatggatgccgtagctgctacatacattggcttctccgtatttggagcagggaaaccgaatgtattcgggacgctgattggctctatcttaattggtgtgctgttaaatgggttaacgatgctaaatgttccgtattatatgcaagacattattaaaggagctgtattagcaggagccttggctttaacgtattaccgctcaaaacaaacatctacggctgtgtaaacagccgtttttttcgtttgaaatcgggaagaataaggaaaaataatagtatagcctattatttatgtagaaagagggagtatagatgaaacgtgtcgtcattataggaggagtagctgccggaatgagcgcagcttcacagcttcgccggatgaaagaaaaagaagaagtggaaatccttgtgttcgaaaaaggtggagatatctcttacagcgcatgtggcatgccttactatctgtcaggtgttgtaaaagaaaaagacgatttggttgctcggacgaaacaagagtttgaagagcgaaacatctccgtccatctttttcacgaagtaaaagaagtaaatcatacaaaaaaatacatagtagtgcaaaatgtaaaggcgcaaacggaaaaagaggtaacatatgatgaactcatcattgcaactggaacaacagctgttaaacccaattttatgagtgataacatgccgaatgtatgcacattaaaatcattagcagacagcgaaagaatctatacatatctacaggctcactccgtagagaaagtcaccattatcggcggaggatatgtcggaatggaagtagctgaagcaatgaaggctttgggaaaagaagtacgggttattgaacagggaaagcagattctatctattttagatcaagaaatggcagagcatttgcaaaagcagctagatgacgatattttatttcatttcgaagaagaagtggaagcattgctgtattcagatggttccgtcactcacgttcaaacaaacagtcaaacgtatcaaacagatttagtgattgtaaatgtaggagttcgtccgaatacgcaattcttagaaagaaacggactaaggatgcttgaaaatggagctattttagtaaatgagaagttggaaaccaacgtgcctcatatctacgcagcaggagattgtgcaacgagctatcaccgcgtattaaaaaaagatgttcatattgctcttggaaccattgccaataagcaaggaagggttcttggttaccgattagggggagaaaagcgagaatttccgggtgttgtaggtacaagtattgtcaaagtgatggactatgaaattggaaaaaccggcatttcagaaagagaagcaagagaaaattctcttttatacaaagccatcacagcagaggctccgagtcatgcttcttactatccaggagctgaaaagattgtgataaaacttgtttatcatcctgaaacaaaagagattttgggggttcaaatgattggtaaagaaggagtatcaaaacgaatcgatgtatttgcgacagctattacttgccgcctgacaacagatgaaataaccatgttagatctttcgtatgcccctccctttgctacggtatgggatgctgtacaaattgctgctcagaaagctgaatagaaaaagatatagagacaaaagtatgttagctgaaggaagatccgaacaaagtgattcttgattaagaatcaacttcgttcggatttttttgtggtgaggacgaacgcaggcttcatatatttagctgcttctagctgttgactcgagggcaaggcggaaattcctgcgggacaagcggttcggctcatgtatcctatttgttcgtttttagattgtattgatttcgttatgtttcaatcttttttcgattcgacaagcagcatcttttgtcgaaaaacaagttgtaaaaaaaagataaatggtattcctatagtaatgtaagcgtttttaaattccgacaaaataatttttttgcaaaaaaaatgtctattattgcgactctatttacatatttagtagaatttgtaataatgcgttataagctaatttctttgtcataggagaggattttgtgtttggagtgagaaatagaacgaaatcagagagattattagtagaaatcgtccaaaaaagacaaaagatggtgcagctcggagaagaaaaaggtttgactaatgaagaaaccgttacctgtagtcaagagcttgatcagctcttactcgtttatcaaaagaagcgtttaaaagaagaggaagaaaagacatcgtttgccacgctgattagccgctttttatctttttcaaagctgtaatacaggacaagcattcgggatcgggcagtaaaacaatcgtgctgcccgtggcctctcttcacctttaaaaaatgttaattaaaaagatcataaacaaaataccaaaaataaacgaataagtagcaaatctttcgtttccatcgccgtggctttctggaatcaactctttataaataataaaaagcatggctccagcagcaaaagctaatccatatgaaacgagagaatcaacaaaattagttaaataaaacccgagtaaagacgttacaatctcaacggagcctgtaagggtagcaattaaaaatgcttttattttactgatgttttgctgagctaaaaatagcgcgaccaacagtccttcaggtgcattttgaagaccgattgcaagggcaattaagttccctgtattttcaacatttgaagcgtagctaacaccaacagacagtccttcaggaaggttatgcaaagtaatagcggaaacaattaaaagtgctttttcatcaaactgaatgccggttttagaatgctcaagatcaatgtgaggaatattctgctccaagagtgttaatgttacaactccaagcagtaagccaatggctaaggaaaaaaaaccgccactttgaagagattctggaatcaagctcatagtagaagctgctgtcataatacctgcagtgagcgcaagaagtatatctttccagcgatgagtgagttcttgattcaaaaacagaataggcaaagcgcctactccagtcgatagcgcagaaagaatgcttccaattaggacctcagtcataaaccgtctccttttacgtattcttctttttatcctcaattcacatcgttcttttagtgtatgtttttttggtttctatgagcatgactattttaaaagtgaatagctttatgcaataaccttacaaaaaagttgaaccagtgaaggttcaactttttaggtaaagtacagctcctgaacttggttagcaatgtgctcaagcttattggaaacttgaggaatgccatatcctacatacaaaggagatgtggcaaagcgaggaatgattttcgccgcaattttgccgtttttaagatcataaaaaaataagttgtagctcgtgcagctacgatgaaaatgatttaataaatagtgagcagccgtttgaagataatctgcaaatgcgtgcagctctttgtcaagctgatccgttatcacgttaaattcaaaaaagcccattctaggttttacagataaattaaatgtgacgtgttcattttgggcaattgtgactccttcaaactgctctagcttcacattttcatttacatctatctcatttaaaccaataatttgcatatgaggatgtcgtaatgatcctccggacatggggccgtggtttttaaagaaaagaacagaagcatattctccgctgttcatcatagatatccatcgttcagtagcgaagttcagcaaggtgtacagatgttcctttggataaatagatagctccgaagaacattcatcggtctcaataataaccgtctgataagcatcttgcagaacgggaaacttatttttcagccaaatgataggtccttgtttttcaataatgcctgtaagagattctacatcgcaaaagggacagggattttgccggttaacgattgtttcaggcttttgtgaaccaatcgcggaattaaataataaatgggttggtttcataatcattcacctttttatgtaatggtcatatgtttattgtattaaaagcatatgtataaatccacttatatacattttttatcaaaaaaattgtacaagcggagagaataaccgatgaaataagcctgctttgattgactttgaagggaaattttagtattatcttgatatcaagataatattaaaggaactgattaaaatgacgaatgatgtaactagagaagagttagaccaatctcttaaattatttattgtactatctcgtgccaatcgttcaattaatgatcatgtgcataaatttattcaacagcatggaatgaatccaaccgaatttgctgtcctagagttattgtaccacaaaggccagcagcctctgcagcaaattggcggaaaaattctactcgcaagcggcagtattacgtatgtagtagacaagcttgagaaaaaaggcttcttagagcgcgttgcttgtccgaacgatcgtcgcgtaacctatgcagctatcaccaagcaaggtaaggaaatgattgaaagcatgtttccgagtcacgaaaaaagaattcatgatattttatccgttttatctagcgaagaaaaggaagttgccatttcgatgcttaagaaactagggcactatgcagatgaatttttaccggaatcgactaattaattaaggaaagctcgtttgtttctgttgaacaaacgagtttttttctatgacttctttcatgaccaatcgacataaaaataaaaagttacaaaaaattgaaattaacaggaatacagctggataaaaacgaattaggttacatacagacaatagaggaaggagaacaaatgatgaaatttgaagattatacatatacgcgacctgatatgaatgaaattgaaaagcaatttgaaaaggccattacacattttacggaagcagcgtcagtcagtcagcaaaacgaggcaattcgtttagcaaatgatgcgtattcccagtacagcacaatggggaacatctgctatattcgtcattctatcgacacagcgaatgaattttataaagaagaacaagactattttgatgaaacacagccgcttttagaaggatatgtagagaaattttacaaagcgttaatctcttcgccttttaaacggcaactagaagaaaagtggggcaagcagctgttctctcttgctgaaatgcagttaaaaacgttctctccggaaatagtaaaagagcttcaggaagaaaataagctatcgtctcaatatacgaaactagtggcgtcagctaaaattgtatttgaaggagaagaaagaacgttagctcagcttgatccgtttatggagtcacctgatcgaggaatgagaaaaaaagcagcagaagcgaaatttcaattttttaccgatcatgaagaggaatttgatgatatttatgacaaacttgtaaaagtgcggaccaagcttgctgaaaaactaggctataaaaatttcgtagaagtgggctatgctcgtatgtctagaataggctacgatgctgaaatggttgccgcttttcgcaaacaagtaaaagagtatattgttccccttactgaaaaactaaaaaagcgtcagcaggaaagaattcaagtagagagcttaacttattatgatgaaccgtttcagtttgaaacaggaaacgcagtgccaaaaggtgatgaaaagtggattattgaaaatggacgagttatgtataaggagctttctaaagagacggacgaatttttttcatttatgcttgaaaataatttgatggatctagtcgctaaaaagggcaaagcaggcggaggctactgtacgtttattgaagaatacaaagcaccgtttattttttcaaattttaatggaacatcaggggatattgatgtgttaacgcatgaagcagggcatgcttttcaagtgtattccagccgagatatggaaaccaatgagtatcactggcctacgcatgaaggagctgaaattcattcgatgagcatggagtattttacatggccttggatggagttgttctttaaagaagacaaagataaataccagttttctcatttaagctcaggcttaaccttcttaccttacggggtagcggtagatgaatttcagcatgctgtatacgaacgtcctgagatgacgccttcggaacgaaaacaaacgtggcgagaaattgaaaagaaatatatgccttctaaaaactatgacggccatcattatctagaaagcgggggcttctggcagcgccagcttcatatttacacgtctccgttttattatattgattacacactcgctcaaatttgtgcatttcaattttggaaaaaagatcgagaaaatcatgagcaagcatggcaagattacgttcatttgtgtaagcttggcggaagtaagccgtttttagaattagtagaggaagcgaatttgatctctccattcgaagagggttgcgtgcagtctgtagtagatgaaattgaaaactatttaaatagtattgatgataaaaagctataaaaaaagagattgagacacaacaaaatcaatccaatctaaagacgaacaaatgggataaacaatctagtatgaatcgcttgttacaccgccgttgatttccgtgcaaggcttcgctttccgcgggcggccggtgagcctcctcggcgctcatgctcctgcggggtctcacctattccgcttttcccgcaggagtcttcgccttgccctccaatcaacagctagaagcacctagattaaatctacgttcaccctcataataaaaaaatcccaatgagtttgattcttaattaagaatcaaacttgttcggatctttcttcaactaacatacttttgttccagcctctttttttaatgattaatttcttgttcccataaaggaatcgtaagggaaacgcgggttccttcgccaacagtgcttttaatctcaaatgttcctttatgctgatacaaaatgtttttaatcacaacaagtccaagaccggtacctgagggcttcgtagtaaaaaaaggcttttgaatgtgcgtaagcaaatgtgaaggaatgccgactcctgtatctttaatgaaaatagtaagatctttagtatgctgagtaacgtttaaatgaatttctcctccgctaggcatagcttcaagcgcattttttaacaaattaatgagtacttgcttaatttgatttgcatcacagcagatgtatgtatgcggggcttccacctgcgttttaactacgacattttttaatacacattctgattcatacagaagaataacgtcatttaaaatagtagagaatgcgtgctttttcataaccgtgtcatgaggtttagcgagcaataaaaattctccaacgattgagttaatacgattcagttcgctcagcatgatggttgtataagaatgatagcggctgctgtcttcatgaataagctgaataaatccattcagagaagtaagcggatttcgaatttcatgagcgattcccgctgccatttcgccggctaaagataacttatcggtttggcgaagaaatttttctgtttctttttcttctgtaagatcgcgtgaaataccaaaaagcgcaacgacttgctgatcacgattaaaaataggtgaaacagtgatttctacatcaattatttttccgtcttttcgcttatcttgagtttcaaaggctaccagcttttctccttttttaaccctttctaatcggctttcagcgccgccttttaagccagcaggaatgaatggaatggcttttccgacaatttcttcagctttccatccgtatatttgctcaaaagcatcgtttactttaatcactttaccgtctagactgaacacggaaatggcgtcgcgattgtatgtaaaaaaagattgtaaatactcttgagcagagtacagttcatcttcggttttgttcattttgaccgtcttaatagcaatcagttttttagagaaatgagcacaatacaacaaaataatcattgtgatcagcgtaaacaaaatgaaataaacgatatctaatttcacgaaagtcacagatgtaaaaagagtgttgcttacataaaagtacaaaacaattattatggacattaatgtagaaattacaatagcgacatagctataataaataaagctaacaataattccaagaaacaaaaataaataattaataacagcaggttcaatagatgtgatgtacgcaatataggcataatagcatataaaaaaagaatacataatgatagcaggatgaaaatgaaagtagtacatagccgtcactaccaataataaaattcctccgcttataaaaacaatcatatgaggatcagctgcaataaagtggtataacacaatgtggacaaaatacagcagccaaaaaataagtaaaagaataaaattccgtttttttataaggttgtgtgattccataaaaaatccctttcttaaatggtgaataattttataggagaataactttatagtcagctagtcgctcgatatagtgatatatcactcatattagcatagttacaactgtgtgaatagccgaattgagtacttagactaaggaagatagatctagaatacagctagtcataaactattaaggaaatatgaggggaatatgaatgaaatgaaggggatgtaaagcttttgtgataaccttgtaaaaatgaacttttttctaattggataggctatactgccagtagagccatatgaatggtgactacatagaggctcagatgattcgaaaggagacggtaaaatgaacaaaagtttattagtcaagttatttggatcacttctagcaattatgttaatcacagcatgcaactcacaaacggatgaaaaagatgccacagaacagcaaacagaacagtcggatgatactcaagcggaggatacaactacagatgattcacaggaaacaatgaagcaagacgaagcagatgattcatctggggatgaagcagctgatgatcaagaagaatcaacggatagtgctgacgaaaaaacagatgaaagtaaataaacgtaagtatttctataaaaaaaagcgactcaagtagagtcgctttttctattagttttgtacggtgatttcgcttgcttcatttaacgttacgttcactgtcgatacgtctgcgtcatctaaaagtaagtctgtaattcgatcttcaagctgttcttgaattgctcggcggagcggtctagcaccgaatgcagggtgatagccaagttcagccagtttttcttttacttcagctgctacgctcagcgtgatattttgttcttgtaatgtttcttttaattcagcaagcataaggtccacgattttaatcaagttgtctttttcaagatgattaaattcaatgattgtatcaaatcggtttaaaaactctggtttgaaataagatgaaagtgaatctaaaacggatgcctgtttaagtgcgtcattttctgcgtcaaacccaaccgtaattttcttttcacctacaccagcgttacttgtcataatgataactgtgtctttaaagcttactgtgcgaccttgactatctgttagacgtccatcttctagaatttgcagaaacatatgctgaacgtctggatgagctttttcaatttcatctagtaagatgatggaataaggattacggcgtactttctctgttaattgtcctgcctcttcgtgacctacgtagccaggaggtgaaccgattaatttagacaccgcgtgtttttccatatattcactcatatctagacgaaccatagcatcttttgagccgaacagttcttcagctaatgttttggttaactctgttttaccgacacctgttgggccgacaaataagaatgaaccaattgggcgatgcttcgcttttaatccagcgcgagaacgtcgaatcgcttttgctactttttctacagcttcctgctgtccgattactttttgagctaagtgctctgctaaatgcttcatttttgctgattcattttcttgaagtttaccaacagggatacccgttttcttttcaataattgcttgaatatcagcaatatccacattcattttttgctgttcttcgtttagttgtttttcaagagcagcttcttcatctcgcagttttgctgctacttcatatttttcatcctttagcgcctgctctttttcttttgtaatttcttttaagcgagcggccgcgtcgtctttatttgtaatgccagcctgtaagttcatttttgaacctgcttcatctagcaagtcaattgctttatcaggcaagaagcgatcttgaatgtagcggtgtgataaatttacacaagcgcggactgcttcatctgtatagctaacgccgtgataatcttcatatttactttggattccttttagaatttcaacggcttcttctacagacggttcgtgaaccataaccggctggaagcgtcgttcaagcgccgcatctttttcaatggaacggtactcttttaaagttgtagctccgactacttgaagttcgcctcgtgcaagagctggttttaaaatattgcttgcgtccattgaaccttccgctgaaccagctcctacaagaaggtgaatttcatcgataaataaaatcacgttttttcgctgttgaagctcagaaattaactgtttcatgcgctcttcaaattgaccgcgcacgccggtattagctacgagagatgctacatctaacagatatacatctttatttaacagcttggcaggaacttttccttccgcgatttttaaagctaacccttcaacaacagctgttttaccaacaccgggttctccgattagtaccgggttgtttttgtttcttctatttaaaatttcaatgacacgctctacttcttcttctcggccaataacagggtcaattaatcccgttttcgcaatttgagttaagtttcgaccgaactggtctaaaaagcctccgccgccatttccttgctgtggctgttccggtgcagcttgttcgtgcgccatttgattgaataaatcatcgatgttcataaagccgccacctccaaaacctgatgggattttatgttctttcattagtgcttgataacatgtatgacataaacgatattgagatttttggttatttgtttgtacatttaattgaatagatgcttcacgtttattacagttttgacaaatcatttaattagcctccctaaatgattttaatcgaagatcagcaggtgtttgacctttcttgacctttcgtaatttcattatactttgaccttttttgactttcaagtcttttgcttaaaaaatttttgaaggaagttcctcgcttatgtacaaaaggtagtacattaaaaaaagatgtgttttatgtgtacccgttctatacatgtaaaaacataagaggtattttgtacaatgatctgcttggagagggaattaatattaataagaagaaaagtggaaaaatgagtgcagagcttaccgttggataaaataagttattgacagcaagaaggataaaaattatactcaagaaggttttcacttaactgcgtaaaagcataaaagcgtttaagtggaaaagaaagatagaaagggaatacctcatgaaaaaagaaatttcatttatacaatcaatagcggtgattttggtgctattagctattatttttgtttcattatttacgttaaagctgccgcctcatattccgctgatatttggtgtagcatttattagtgtgattggctttttgttgaaatataagtggacagaaatggagaaagggattttagacggtgtcagactgggcattaagcctatccttattttaatgctgatcgggatgcttattgcgatttggatggtaggaggaacgataccgacgattttatcctacggcttccactggatttcaccccagtactttttaattagtgctttagttattaccgtattagtttcaacattcacgggaagttcattaacaaccgtcagtacggtaggggtcgctttatttggcgtaggaactgctattggtgtacatccagggctagcagcggggatgattgtttcaggagctgtgtttggagataagatgtctccattgtctgatacaacaaattttgcttctggtatcgttgaagttccgcttcctaaacatattcagcacattacgtggacgacggttccaagtattgttattacagcaatcattgcacttgtaatcggaatcaacggaaatcaggaaagcgtcaattacggggaaattcaaggaattcaagacgcattaaaacatacgtttaatttacatgtgttaacgttgctttctccacttttagttcttattttttcgatgagaagagtcgatgtactgccaacgttagttttaggtattgtaacggccatcattacaggaatgatcacacagcatgaatttacgctgagtcaattgctaggcgttcttcaaagcgggcctgcagtagagtcaggaaatgaagtagtggatgcgattgtgaataaaggcggaatgcagtccatgatgttttctatttcccttatcatgattgccttgtcgctaggtggcttgatgagagccgttggaattattgatgctttgttagaaggattagcaaaacaaattcgccgcagcggagacgttatttttgctacgcttctatcttcaattggagtgaacgttattacaggcgaacagtatttatcgattctcttgcctggacagacgtttaagccgctgtatgaaaagtggaatttagatccaaaaaacttatcacgaacgcttgaagacggtggaacggttattaatgctattattccatggggggtcagcggtgcttttatttcaactgcattaaatattcctgcagctgactatattccatttacattctttagcattttatgtcctattttttcaattattttagcatatacaggcattggcattgccaagaaaaaagctcagtcttaactgggcttttttttttggaaaaaggacaggtgaaaaacgacaaaaaagtatcattccacttttcaaatctataatttaataatacaatttactatacgtctttcttgttaatgtatttggatgaattcttatttctttattgatgaagaaatttgagttttgcggtatgataaataagctgtattggcgatgggatgaatgccctttttagcaaacatttaagaagggtaaagccaaatgaaaacactcattataaaagagaaaagatatttattgaggagagggtttctgttgaaaaaatggggcatcattgcattaatcactgtagctgtgctcggtgtgacagcggttttcaaccgagctgaaagtgatgatgtaaataaagaaaaattgaatttattatcgccttattcaaataaagtagatgtatatagcattacgtatcctagtgataatttaaagataaaagggtttttagtacagcctaaagacattgcagacaaacattatccgcttttagtatataatcgcggaggaaatcgcgaacatggcatgattcgcgcaaaaacactgcagtacttatcatattgggcaagtaaaggctacgtcgtggttgcgactcaatacaggggaaatggcggaagtgaaggtacagagacgtacgggggtaaagatattgacgacgtattaaatcttattaagtggggagaacagcttccttatgtaaatcaccagcaaaaggtagcgctaggatattcacgcggcggcatgatgacgtatttaacgatgaaaaacggcgttaaatttgatgcagttgtcgtacaatcaggtattacagacatgtttcaattctatgatcaaagagggcctgaaatgaaacaagtgctgcggacgattgtaggagatccggcgcagtatccagagaggtataaaagtcgttctgttgtctattggagcgataaagtaaattcacctcttttgattttacagggtgatcatgatcgtaaagttcaccacacgcaggctgaaaagcttgtgaaacaattagatgagcagggaaaagaatataaatatgtactgtacaaaaacggagaccatccgctaactgcttattatgatcaatataacgcggaaattgataaatggtttaaaatacatttagctaagcagtaaagaaattggaagtagttttgatgaatggaaaagagcagcttgttttatcctactacatgtaagcatataaaaaggggatgaagcaaaatgactcagtctaaaagtcaaaaagagcgtcagtggaatgtgcgaaaacaatcacaaaacccatcgcatggaaaagtgaaatcttttgaagaactatcagaagaaatcacgcctaaacgtaaataaggtaaccaccacataaaggaagacacaaaaaaggagagctgaagctctcctttttctatgtttgtttatggatttgtggaccacatgcccgcagatttgataaaaatacgcggatgcaattttaattgtgcgaccataatttctgctaggtcttcaggctgcatcactttatcaggattgccatccgttaagttttctttatacgctaattccgttgctactgtacttggtgttagagctgttacacgaatattgtgtttgcgcacttctaacgctagagattcagttaagccgagcacgccaaattttgaagcgctgtaagcacttgtaacgggagcacctttttgaccagcagtggatgaaatattgataatgtctccaccatttttttcgattaattgaggtagaacggcgcgcgttacgtagtaaacgcccattaaattcacatcaatgatttgtttccactcagctgggtctagctctaaaaagcttccgaatttaccgattcctgcattgttgattaagatatctgttgcccctaattttgtatgtagatgctcaactgctgcatttacttcttccatagaagaaacatctgctgttgcataagcaacttgtacatcaaatgcttctagttcagaagcaacagcctttaaatctgcctctgtacgagcaattaaaccgatatttacgccttcttttgctaattcaatcgcagttgaacgaccgatgccttttcctgctcctgtaataagagctactttgcctttaagtgattgtgccatgtatagactcctttcaatgttccgcataaacattcttcataataacaaagaattatccattactatcctatagaaatgcacaaatgatgtcaaaaataaagattattaaaatggcttcaagtataaatttccttttcatacaaaaactatagagactaaaaagaagaaattccgtttcttttcgttcaatgtagtggaggatgaacaatgcgtataaaaaaactatctgagttaacgaataaatccaaaaagcggaaagaaaaagctgatgaatcgaaggacactaaggacactaaggacactaaggatactagtgcttcttctacacaggaagagcagaaattatctgagagggtgggagataatttatcccgcatgaaaaaagcactgggacagagcacggatttagttgtacgagagtttcgaatttcgattgaagaaaaattcactttaggtgttgcttacatcgacggattagtaaataaagacgaagttgaacactattttggatgttatctattttttttaaagttgtcattgtgttctatgccatttagttaagtatcgtccaattgtgtaatttacgggtgcgcaattttttaagctttcctttaggtctaattattacaggcgtggcgtattacattattcccaacacagcgtacttcaattattttgaaaaatattactggccgttttatttatttgtactaagcgtctgttttccggcgttatttattgctctttcttatataaagaaaaataaggcagctaaaggcgatagaagccaacaaacatagcattatttatacgcatgtggtataatacgatgacaattcaagaagaaacgccgtgcacgtttgtatatgtacgggagaggttcgaaaactccctctataaaaaactaagatcatcgttgatgacaaaagacacggttttagcgtgtcttctttcacgtgcttttctatcaacgcgtctttttgatgtgtatgctggcgaggacgtgtatcttagttgctttttagggagattgctggaaaagagcagtctcttttttgtgttataaaattagtcacaaagggaacgaacggttcaataaagtttcttcttcttttgatttcaatcaaaaaggagacgaacaataatgataaaaaatgaaaaagctattgttgtatttagcggaggtcaagatagtacaacatgtctattttgggctttgaaaaactttaaagaagtagaaacggttacttttcaatatggtcagcgtcatagtcaagagatagaggtagcaaaagctattgcagctgatttaggtgtgaagcacaccgtactagatatgtcacttttaaatcaattagcaccaaatgccttaacgcgagatgatattgagatcgagcaaaaagaaggagagttgcctaccacatttgtggatggccgcaatctgttatttttatcatttgcagccgtactggctaaaaacagcggaggccgtcatatcgtaacaggcgtttgtgaaactgatttttcgggatatccagactgtcgagatgtatttgtaaaatcgttaaacgtcacgcttaatttatcaatggactttgaatttgtgattcatacgcctcttatgtggattgataaagcagaaacgtgggcgttagcggatgagctaggggcgcttgagtatgtgcgtgaaaaaacattaacatgctacaacggtattgttgctgatggatgcggcgaatgtcccgcatgtcaattgcgaaaacgcgggttagatcaatacatgcaaacaaaagaagggggagaggaataatgctgcaacaaatgtatcctcaagtatttcatgactatcaatacgaactgaacaaagatatgcagtttgctgcggcacattttgttcctcacacagaagcaggaaaatgccgtcaagtccatggacatacgtatttcgtaaatctaactgttgccggagatacattagacgaagcgggctttttagtaaactttgcgctattgaaaaaaattgtttctggtcaatttgatcatacattattgaacgatcattctatctttaacgaagaaaatccaaatgattttcctacaactgaagttgttgctcgtaaaatttatgagttggttcaagaatatctagacacactaccaaataagccttcttgcgtacaagtattcgtgcgggaaacgccgacaagttacgtagtttaccgcccaaagaaggtgaaaaaacgtggctaatacaattccagtacttgaaatattcggaccaacgattcaaggggaaggaatggttgtaggacgtaagacgatgtttgttcgtaccgcgggctgtgattattcctgcagctggtgtgattcagcttttacgtgggatggatctgctaaaaacgatattcgtcagctaacagcagaacaaatttggacggagctaaaagaaattggaggagagtgctttgatcacgtcaccatttctggaggaaaccctgcgcttatcaaggcaattggttcacttgtagagcttttgcacagtcatggggtaaaagcagctcttgaaacacagggaagccgttatcaggattggttcctaaagatcgatgatttaacgatttctcctaagcctccaagttcattaatgaaaacaaatttcgccgtattagacgatattatagaaacattaataaaggaaaaacgcatggcgcacataagcataaaagtcgttgtatttaatgatgaggactttgagtatgcagcgtctgttcatgaacgttatcctgaggttccattttttgttcaagtaggaaacgaggacttaacgacaatcgataatgcgtcgttaacacaagaattgcttaaaaagtatgaatggttaatcgataaggcagtggcagctaaaaacatgaacgatgtaagagttctgccgcaggttcacgcccttgtttggggaaataaacgaggcgtgtaagcgcatagcaaaaaatttacaaagaaaaataaaaacagatatatacaaaataaaaaaacgctgttagaatgacaatcgtagaaagagaggaaatacaaatgagcggtcgaaaagatgaagaattagaaggtgtatcactccttggaaatcaaggaacaaactatttgtttgaatatgcaccagagattctagaagcatttgataacaaacacccaaatcgtgattattttgtgaaattcaactgtccggaatttacgagcttatgtccaaaaacaggtcagccggatttcgcaaccatttatattagttacattccagatgagaaaatggtagaaagcaagtcgttaaagctttatttgttcagcttccgtaaccatggagatttccatgaagactgtatgaacattattatgaatgacttaattaaactgatgaatccaagatatattgaagtatggggaaaattcacaccacgcggcgggatttcaattgatccatatacaaactatggccgtcccggtacaaagtatgaagaaatggctaattatcgcctgatgaatcatgatttatacccagaaacaattgataatcgttaattcgaacaaacaggttgtgtatgcaacctgttttccattgcaaaaacaacaggtgagaaggtgaaagaatgtcacagagatcagcattagtattaggtgcaagcggacttgttggtcaagaacttttaaaaatgttattaagcaacagcttatataaccatgtgacagtgtttgttcgaaaaaagctaccaatcgaacacacaaagctacgtcagcttgaaattgatttttcagagcttgataagcatgaagaatgctttgcagttgatgatgtatattgctgtttaggcacgacaaagaaaaaagcaaaaacaaaagcgaaattcattagagtggactacgaatttcctttaaaagcggctaaatgtgcagaaaaatatcgctgcaaaaactttttaacgatcacagcaattggtgctgatcttcgttcgccattcttttacagtaaagtaaaggggcaagtagaagaagatatcgcaagcttgtatatccgttctactcactttttccgcccatcgttattattaggcaagcgccaagagtttcgcctatttgaaaagattgggggatacacgttaaagtcgtgttcattttgccttgtaggaaagtggagaaagtatcgtccaattaaagcgtataacgtagccaaatcgatgatgaaagctgctcttgaagataaatgtggggttcatgtacatgaaagccaagacatttatacaggtgaatgctattattcgtttaccaacggcaagcgagtattatcaaaataaagaaaagcctcttcataagaaggggcttttttctatcttccgtcaccatccgcatctccatctccaccgctatctccatcgccatcatgatcgtggttagaagcagtttcactccagcttgtgtaggagttagaatcttcttcggcataattcatgggttcaacggatgtttttttatttgaagtttgtttgcgtttaaaaacgaactgcacgatgaaaaaaagaatgacaataagagcaacgataaacaatacagtatcaaacatgctagtaattcctttcggtaagaagatagtagtagcttgttgttattgtcacacgaaaataagcccctttcaagaaaaatggggcctgtttttgtttctttaaggaaactttttttatctcaaccatatattattgtataaagaaacattttagaaaagagggaatacagtgaaaaaaagttcgaaggatgttaaggtgcaacagtatatttacctcatgtataagctggggattattacagaagaacaaaagaatcaattctttcaaaatcaataaaaaagcaaccgcttttgctgtccggctgcttttttcctttacatagctggattaatgatgatgtagtttttatggttgacaacagttcgctgttctaagtctaaatcgcggtagtttttcatgtaagtcaaatctacaatcacggagttttcatttactttttcgacaatgccctgtaagccatttttaaattctatcaagtttcctacctctgctattttcatgattcatcgctcctttgttttaaattagttcattataaattttttcaataattttaattttaaaaatagtaaaactagttagcgttttcttttttacaattttgccttaaaactgggaattagtaaagggttttttgaaaaaatataaaataaaattgaaaaaacaagtaaaatgtgctgagaaataaaaggaattgatagctttaacgaaagagagaagcaggacagttccatctttgttcatctttcgttataataaacgaggtataatcttgtcataaattataagaattagaaggtgtagaaattgaaagatactggactcgtgctcgaaggaggcggtatgagaggcctttatacaactggagttttagattactttatggaaagaaatctgtaccttccgtatgtaattggcgtttcagccggcgcttgtcatgccacttcttatttatctagacaaataggaagaagtcgcaaagctaatttagattttttagaggatcctcgctacttgtcgtggaaaaattattttaaaacaaaagagatatttggaatggatttcgtttttgatgaaattcctaatcagcttcttccatttgactttgaggcatttgctgagcgtacagagaagcttgtagtaggagcaacggactgtgtgacgggagaacccgtttattttgatgaatatgaccgggacattttgacagcggttcgcgcttctagttcccttccatttttagcacctgtcgttacatataaaggaaaagagctgttagacggaggaattagtgatccgattccaatcaaaaaagcagtgcaggatggatatagaaaaaatattgttgtgctaacgcgaaacgaaggatatcgaaaaaagaaatcaaatatgctttggttattgaagcgcaaatatcgtcattatgatgggctgactcgtgcgcttgagaaccgctataaattgtataatgaaacattgtcatatattgaagaacaggaaagacaggggaatatctttgtgattcgtccgcaaacccctcttgtagtagggagaattgagaagaatcgtgagcgtctcgacgctctttacaaccaaggatataaagaagcagaagctcaatttgcatctctgcaaaattggctgaacagttaaaagcgaggtgaaactgaatggatgaacaaacagcaataaacatgttgaatgagttaagtgaaggaaaagtaaccgaaattaaagttaaaaaagaagactttcttgcttttcgcccttttttagtaaatcgccctgatttcaaacattttcgtggaatagctggacgcggtggagattttacctatacgtatctagaaattcctaggagctaaacgaaatgatggcattatttgattatgccttatataatgaatgtatgagcctgtacagtagagaatatactgttacaagtgcttgtgcgtttatttagtaacgtacggtaagaacgaataaacgtgtttagttataggagggatattatggatgagtttcgaaaaagtacagcacctttttattttgcagatcatatatggaaagataaaaatggaatgacgacttatgggatgctgttaacgaaccggcccgaagatgacggggactatgacctccattcgttattagaagaagcatatgtagatcataaaaaaattctaattactactgtttacgacaacagtgaacagcagttgaccggatacgtgatacatttatcagatgatcaagacgtctttacgtttatggatgatacgggtgctaagctagtgattgatttctatgatgttgtagaaattgagatcgaagattaaaaagagctgaatgttgattacaacattcagcttttttgtgtaaaagtagatgaatttaaatgtttatcataagaattataagggaaaaacgaatgaagaaatttctgattaaactgaaataaatcgggaaaatatacctgcattttagaaaaattaccgtgattatgacaaaaaacaaggtacaatgtcataattgtgttccgaacgtaattttgttcatcaaacttaaagaaatgtaattgaatcgttcggtgaaacccctatatagctatgatagagtaataccatacgaaatttcaggaggtattacctatgaaacatagttatatgaaatcaatggtagtagcttgtttagctactctttcatttataggttttaatgcaacagctacggctgcaactaattataaagtagtcaaaggcgatagtctttggaagttaggtaaaagatatagtgtaacaattgacgatattaaaaaattaaacaatcgtcaaggagatatgatttatattggtgaaacattagcgattccgagtaagacaaaagtgctggctgctgaaacaacggaaccttcaacggcagcaccggctaatacggctaagccagaaccaaaaccagaagccaaacccgcagagcaggcaacacctgcagtttcaatctctgcaagtgaaaaagatttattagctcgcttagtagaagctgaagcaaaaggcgaatcttatgaaggaaaagtaggggtagcaacagtggtgttaaaccgtgtagattctccgaagtttccagatacggtaacaggagttattaaacaagttgtcggaaaagcatacgctttttcaccggtccaaaacggatcaattaacaaacctgcttcagaagattcgaaaaaagcagtagagcaagcattgactagaaaagatcgtttagacgattccatttacttttataatccaaaaacagctacggataactggattcgttcacgtgctgtaattaaaacaattgatcatcatgtatttgccaaataaaaaagagccgttctggctcttttttttagtctaaaaaaatatctcgttccaaactgccttcagaacctgttaaaaccagaccaatatcggtatcagcttctaagttctgaacgatggtaaaaggcactttatgttggttagccgcttgaatatagggggagaggtatgagtaagacaaggagccatttaaaaacaaatgaccgtctttcaatttttttaaaagaggctttatttttgctgcatcctttttcatgacttgccctttttttagcgcaagttcaatattctcacgcagagcagttaagaaatatcttctttcgtctctttttgtttcctttgctccgtacattcctcgttctaagtattcttctagttgatcagacattgcgtcacttcctttcgttataaactataaacgattatggctataagtaaaagggacaggaaaaaaggaaaatcactgtgctatatcacctgtttttttgctgagtacaaagaaaaacaaaaaatgtgttgaaatttagcctgaaatattgtttaatgtaaatagataggaaatcatatcggttttttattaaaggtttgtaagcgattacagatatacatacatagcagcgtttggggagacgctcctatgattttatgttcaaagcgcattgtataaaaaggggattatatagctttagggcatatacggtcaagcaaagggtcagataaattaataaaaaatcgttatgtattttcataagaagaacggtcaacatttttgttgagcgttctttttatgcgttcatattatgtttattcctcattgcagcagacagcagatgctgaaaattgtaaaggtccattcctcgttgcatctctcttattttacataagttacatgtagtatgtttcaaagccttaaaaaatatatgtctctacgcttgtttaatcctaacgaggtggtagaaaaggaatattttttaagaaatcgcaaaaaaagaggcgatcgcctatgcaagaagtaggtgaataacatatgtaataaagagaatgaaatataatttgaggaggcatgtatcatgcaagaatttgatattaatgacataagaagaccattcggtggttttggaggctttggtcgtccaggattcggtttcggtcgcccaggttttggtttcggtcgtcctggttttggctttggtcgcccttggggttggggttttggagctccatttcttggaggattagttcttggaagtgcattaggaggtccaggttattacggttatccagcaccatattatccgccgtacccaccatattatccttattattattaaaacaatgagcgctgataaagcgctcttttattatgttcagtccaagatatatatagaatgaatgcaagacgttacgtttagaaaatgataacagttttaaataaggaatgaacgcttaagctaaagaagacaagttttccttgcaacaattgttgattttgctataataacttcggtggcatttttggtcactgggtgggcgagggatagatgaaaagaaggaaattagattgaacgcattatttgaaaagttgtttcgtttaaacgaccaccaaacaactgttggaaaagaaagcttagctggggtcatttcatttctttccatcgtgtatattattgctgttaattcaaccattttgtctgatgctggtattccgcttgaagcaggaatattcgcaacagtagcttcggcttttgtaggctgtgttattatggctttttgggcaaacgcgcctcttattctggtgccaggtatggggattaatgcattgtttacgtatacgatggttcaatccatggggttatcttggcaagaagggttattagcagtagtaatatccggctttctttttatagcattagctttctcacgactgtctgccaaaattgtctcttcgattccgcattcgctaaaagaagcgataacagtcggtgttggcttatttttaacatttatcggtttgcaaaaagggaagcttgtagttccaagcgaaaacacttttgtagcacttggagacttgtcagatccgtttgtgatcagtacgctgttgacgttaattatcacaatcgtactgtttatccgaaatgtgaaaggtaactttttgttaagcatgattgctggatcagtccttgccttcttacttggtgtaaggagcggtgcagaaaaaggacagtccgctgggagcgtgaacgacttctttagcagctttggtacattgtcttttggagctattggagacgttgcgttttgggcagctgtcttttcattaacaatggtattgatttttgaaaatatcggtttgctgcatggtcagctaggtatgatgaatcaaggtagcaaatttccccgggcctttcaagcaacagccgcctcagctttgctaagcggcgtgtttggaacaagtccaacggtgtcttctgtagaaggagcatctggtattgcagctggagggcgaacgggtttaacatcgctgattacaggagttttatttttaagttcacttctgtttattccatttattaagctcgttccagatagtgctattgcacctattcttattgttattggagcattgatgattcaaaatatcaaaaacatcaatttacaggacttaacagaaggtttccctgcatttttaattattgcgcttattcctcttacgtacagcattgctgatggaattgcatttgggttcattgcgtatccactgcttaaattattccttggtaaaatgcgtgaagtatcgatgtttatgtatgtaagcgcgctgttgtttttcttgaattttgtgctgcattatattgcttaaaatagacagctgagtacttttgctcagctgttttttgtatttgcggtaaagaatcctctttttagatatcatactccgtatttcgtgtcctttggctaactttcgcttctaaaatgacgtttcctgcgtaaagtagtacagaagtcggagggggatataagggggagaaaatgatgggaattaaattaattaaaatatcagccgtttattttggacttggcatcatattggggtattatatgtcaattgttcacagctacgctttgacacctgttcacgtgcacatcaatttattaggatggacgtcgcttacgttagcgggacttatttattatttgtttcctgcgtttagcgaaagtaaattagccaaactgcacgtatggttgcataatataggattaccggtcatgatgattggtttatttttcatgatcgtactagaaaaccaagcttttacacccgtagtggcagcaggagcaacacttacggctattggcgttttaattttcgtatgtcacatccttaaaaatttgaaatctgaacgataaacgaagaaggtcgttgacgatgactgctaatttcaaaaggaaaaagaaccagctatagcgaatatacatgtaaacaaggtgaaagtgtgatttacataaaggtgtgctaggcatctttataaggagggataagctgcagggagttctagctcttataaaagccaataaaagggctgattataagtttcttgcggcggagatactatgggagaacatcaacaattagtgcgtgttagggagctagcaaatgaaattattcgacttcgtcttcaagaccgtacgacttatgacgaattagagttgcaaaataatgtagagttgttgtctcgttctgtggttgacttagtaaacattatgttagccgaagatgtggattcgtctacgtctttaaaagctacagcttctaaaatgaaaatggtgtataataacatgcatcaagctgagaaaaaagattatttgcatttctaattgctaggctccttttcgccacaaacgaaatggaggtgtacgaggcagatgctatcgtcactaacgacttctgaagctattgtagcatccgttcttgcactggttgtcattgccgtttccattatcttttttgccactcttattatggttgttgttcgacgagaaagaatcagcagcttggttaatcacggagagcatgcagatggaaagcaaaaaagcttaggtgaattttttcgttctttacggaaaaaataactaccgttttcttattaaatagataaaagcggtcaatttaaacgttgaccgctttttttagatggtttgcttatttttttctaaaacaatacccgctgcttcactaacagatgacacaacagcagaggcgtggcgctgcacagcttcaggagctgtagccatagcgaaactgttcggcgttaattgaaacataggaatatcattaaatgaatcccccacacatgcaatttcctctggttttagctgaagatgatttaataaaatttcaatggcatttcctttgctgatatgtttaggcataatatccaaacactgcttggcggaaatatatgtatcaatataatcaccaaactcttcgttcacttctttttgcagagctaccatttcatcatgatctccaagaaccgtgattttggatggagaaagagcgtgaccaaatgaatccgtcatttcaatttgttcttcgatagggaaaaacatgtgagtttcaatcgcttcaataatttcatttcgctgctctacataattcgtgtcgtttgaacagacaagcgtaatacggttaggatctatcgtttttttataaagttgaaccgctaaatcatcttcaaacacttttccatgaagttcttgattttctttggtccacacaaatcctccgttttggctaatgcgatgaaatgtattattaatatcagtagaaatctttaaaatttccgtatccattcgtccagaagcaagacaaacctctactccttggcgctgaagttcactaagtgcgtctgcattatgctgttctacgtatttttcttcatgtaaaagagtgccatctaagtagcttacaaataatttaatcattgcttgaaaattcctttccttgaaaaattttctgtgataagagcgttacaaatttattacattttttattctatcagtgtttcccaagaaactcataaaaaaagctcaaaccggcggtgaattcaaagagactaagacataactacatcaattttttccgcaggagtcttcgccttgcccttcaaacagctagaaacagctacatgaaatcaagttcaccatcacaatgaaaaaatccgaacgcagttgattctcaattaagaatctggatttaccgttcggatctttcttcagctaaaatccatttgtcgcagcctttttttcaggtttgttcactgtaaaaaaacagccacggtctaaaagaccgcggccatattttacaatacgttaaaatatttcgcttcaggatgtgcaaaaacaagggctgtaacagaagcttctggttccatcatgaaaccgtctgttaactgaatgccgatgtcttcaggtttaagtaatttaaacagttttgcttggtcttcaaggtctggacatgcaggatatccgaatgaaaaacgctgaccttggtatttggctgaaaaacgctccgccattgtaaagtcaggcgaatcagggaatccccagcggtcacgaatttgctgatgaacacgttctgctaatccttcagctagttcaagcgcaagagcttggaacacgtgactctttaaaaactcgccgttttctttgaatttcgccgcgcgttcgcgaatgcccgttcctgctgttacagagaagaaacatacatagtccatctctttttctttaggttttgcaaaatcagataagcacaggaactgtccttttgcttgccgagggaaggtaaagcgttcaatttctgttttttcatcagcaggatcataaataattaaatcatttccgtctgcttgagcagggaagaactgataaataaccgctggcttaattaagttttcttttagtgccagttcgagcaagtcatcaacggtttcttttaattgaacagcgcgctcgtctttttcagcaagcagtttattcacttttccttttagtcctaagtgatggcctaaaagcatctgccagttaatatacggaagaacctgtgccaaatcgtagtgtttgacaacgtgccgctttaaatcagccggtacaaaaacaggagcgtccgttgaaatggcggatctttctaaaacagcggtagctgcttgagcggtttgaggctggcgttctcgaaccgttactttcttttcttgccgcgtttttaaatctgctaaaagctgaataacttcttctttgttctgcagcttatttgctaacgctaatccgtccatcgcatctttggcgtagaggaccgcaccttcatattccggggcgattttaaagtcagtaaatttacgggaaagggcagcgcctcctaccataattggaacatcaatgcttgattgtgttaaatcctgggcagtcaaaaccatttgctgagctgactttactagaagacctgacaggccaatgatgtctggcttttcttcttttactgcttcaatcagctgctggggcgttactttaattcctaaatcaattactttaaaaccattgttgcttaaaatgatgtctactaagtttttaccgatatcgtgcacgtcgcctttaaccgttgcaagaataactttgccttttccagaatcattttcagttgcttccatatgaggttctaaaaaggcaacggatgctttcataacttccgcactttgaagcacttctgctacaatcagctggttgtcattaaacaaacgtccaacttccgccatccccttcataagcggtccgttaataatatctaacggatcatcatattgagctaaagcctgttctaaatcaggaagcaatccttcttttgtaccttcgacaatatacattgccaatcgttcttcgagtgttaacgtagaaatttctacttttgcttctttctttttatcacgataaaagtcggtaaacgtgcttaacgtttcatcagttgtgttaaataataacgcattagcaagctcaatttcagcttctggaatagaagcatagcgctctaatttttcggtattaacaatggcataatcgagtccagcctgcgtacagtgataaaggtaaaccgcatttagtacttcacgtccgactggaggaagaccgaatgacacgttacttacgccaagaatggtcaggcaatcaggcagggcttctttaatcattttaattcccttaactgtttcttcagcagaaccaatatattgttcatcaccagtccctacaggaaacacaagagggtcaaaaataatatcttttggattaaagccatgtttttcaacaagcagatcatgtgagcgtttagcaatctctacttttcgttctgcagtaacggccatgcctgtttcatcgattgtaccgacaaccagagctgcaccgaatttttttactagcggtaagattgcatcaaaacgctcttcaccgtcttctaagttaatggagttaataatgaccttaccttgtgagtacgttaaagctttttcaataactttctcgtcggttgaatcgattacaagaggaaccttcactttttttacaacttcttgaataaattcctccatgtcttccatttcttcacggtccggatccgctaagcaaatatcaataacgtgagcaccatttttaacttgagcacgcgcaatttcagatgcttcttcaatttttccttccgcaatcagacgcttgaacttgcgagaaccgattacattcgtacgttctcccacaaaaagagggcgcatagaatcgtcatatacaagtggttcaataccggttacagcatggttatgctcggagcgatcaagcgaacggggcgcaacctcttttaccgcttcagccagtgctttaatatgagcaggcgttgtaccgcagcatccgcctacaaagttcagccagcctttatcagcaaaccctttaattttttgagcaagcagctcaggggattcatgataattgccttcttcatccggaagtccagcgtttggataacagctaactgctgaagtggctaggtctgaaagagagcgaatatgatccgtcataaattcagggcctgtcgcgcagttaagtccgactgaaagaggcttcatgtgttccagtgataagtaaaaagattcgatatcttgaccagcgagagttgttcccatcggctcaattgttcctgaaatcataataggaacttcgatttttagtttttcaaacgccgctgtaatgcctaaaaatgcggcttttacgttcagcatgtcttgacaggtttcgactaaaagcaagtcaacgccgccgtctaacaaacctcgagcttgctcttcgtacgattctactaactcagggaatgtaatacctccggtaacagagagagtcttagtggtaggaccgatagctccagctacgaacctaggccattcgggagttgaatatttatcgcgggctgcacaagcaagcttcacagcttcgatattcaattcataagccaagtgacctaaatcgtattcatcaagtacggtagatgttgagccaaacgtattggtttcaatgatgtcagcacctgctgcaaagtactcttcatgaatgcgctgaatcacatgaggcgctgttcgagtcaaatattcgttgcagccttcatattcttcgccgccaaaatcttcagcggttaaatcagcatcttgaatcatcgttcccattgctccatcgatgacgagtattcgcttctttagttgttgttcgataagtgagctcatttatatcttcctttctgatgtaacaagttgcttgtcatgaatatagcgtgttagaatttcggtcatttcatagcgcataaacggcgtaattaagtaaataccgtcaaataactcatatgctgtatcaattaagttttttgcaatcgcaagaccttcgacttcaccgcggattcggtcatttcccgttgcatccatgcgttctagaatatcttctgataatttaattccaggtacttcatggtgaataaatcgagcatttcttgcgcttgttaacggcatgataccgatatataccggtgttgttaaatgtttggttgcttcatatacctcttcaatttgcttagttgaatagagaggctgagtaatgaaatagtgagccccgcagtcgattttcttttccaaacgctgaacggctcggtctaagtgacgcacgtttgggttaaaggcagctgcaatggaaaaattggttttttgaccaagtggtttgccggaataagatagtccttcattaaactgagcgattaaactaatcaagtcaaatgaagataaatcgtagaccgaagtggcgccagggaaatcgccaacttttgacggatcaccggtaattgcaagtacttgattcattcctagcgtatgaagtcccattaaatgagattgaagtccaattaaatttcggtcgcgacaggtaatgtgaataagcggtcgtgcttttgtttcttgctgcatcagtgttgccattgccaagttgctgatgcgaggtgaggcaagagaattatcagctaatgtaatagcatctacgccgactttatcaagtgcttttgcgccttctaaaaatttcgtgggaccaagctgtttaggcggatctagctcgacgataaccgagcggcgcttcttcacaatttcatgcatatgaggtttatcctgctgctcacgctcttgaaccgtaacggcaggtctcattttaacgactttgcttgtaatcggaggcaggtcttttaaggcagatgacattgcgcgtacgtgagctggtgttgtaccacagcatcctccaattaagcgaaccccttgttcgcggaataaacgcgcgctttctacaaagtagtcttcatttgtttcatattccagctttccttccacatacgccggaaggctggcattaggataagcagataagaaagcacgatcaggaagcggtacttcttcaagagactgaatcatatgataaggacctaaacggcagtttagcccgacaacatctgctcccagcgcctctaattcttttaatgcatctgctaaaggacggccatcttgcagtacgccaatatcatgcagggaaacgtgggtaataataggcttatccgtttcttttcttgccagtgtaagaacggtttttaattcttcgaagtcatagtatgtttcaaacaaaaggccatccacgccttcatttaaaagccaaaacatttgttcacgaatgcttcgcttaacctcttctaaactaatagcgtttttttggaaagaacgaattccgccgagtgtaccaaccacgtaagcctgatcttttgcagcttgtttcgctaattttacaccagcaacattgatgtctttgactgaatcttctaatccataacgggcaagtttttgataattagcagcgtacgtatttgtttgaataacgtttgcaccagcttctacataggctctgtgaatacgagaaacctcttctggtttggtgatgtttagttcttcaaaacagctgtcgataccgtgtgagtaaaggagggtaccagtggcaccatccccaattaaaattttagactttaaatcttcaagtaaccccatgtcaaaacctccttaaattgttccgcttctatttcacgagtgattcgttttatgcaatatgccgataaaatagaaaaagtcttcttaagaagaagacttttttcgccttcttatcttccaagcaataaattgcttgctggatttagcaccatgtctctaacgactggttgctgaggtttcaaagggccagtccctccacctctcatgataagaatcaattgtatataattgaaacatatttttttaaatagaaagaatacttatttaataatttatctgatttttagaaattatacaacattaaattgtgaatttccagcaaatattgaggaaaatttaaaagctaaagggaaatatccgtatattttgtttggaaatgactgttatgttaggggttaaggagttttttgtgagaaatacaaaaagaaaatgaaaaaaataaacgaaaaggcacaagcgctgggatatgcgtagatttccacgtaaaaaggctcgtcttttttttatcgtttctacatatagtgaactatgaagggtagaagggtgatgggcatgaaaaggtggaaactcacgctgcaggttgctgctacgtatgtaggcaccgttgtaggagccggttttgcaacaggcaaggaaatcgttcaattttttacacagtacggggaacttggaatggtcggaattttggtcagcggcttgttttttatttggctaggttcaaaaatgatgctgctttcgcacgcaattggggcttcttcttatcagcagcttaatacatatttatttggtgatgtgcttggaaaagcggtaaacggtgtaatgattgtcattttatttggagtaacttcagtcatgctagcgagtacgggggcaataggaaaagaacagttcgggctgtggcctcctgttgggatgatttttacaattgttttaacttatatatttatcgcaaaaggaattaacggtattttaatggttaattctcttgttgtgccgatgatgctttcatttgcttttatcatctttatgccgaatatcagctatttctcactgattcaaacgaagccggatttaacgctcgtcacgcagtggaagtgggcggttagtccctttttatatatttccctgaatctagctttggctcaggccgttttggttccattaggaagctcggtgaaagataggagcgtgattaaaaaaggggccgtaataggaggatgtgtacttacgtttatgcttgtttctactcatcttgccctttccaatttgccttattcatttcaacttgatattccgatgagtgcggttgttaaaaatatctcagcgtgggtgaatgttttatttacggtagttgtgttgggcgagatttttactacattgattggaaatgtatttggcatcgctaagcagcttcagtcatttcttcccctcaatgacaaacaagcttttgcatttattatcttggcttgctttattattgggcaattcggatatgcccagcttcttgaatttttgtatcccatatttggctatattggactagcttttgtatggatgctatgtattaaaaaagaaaaaataagctaaaagctggattttaaagaatagatgtgaaaaaacgaagttaaatgatgtgacaagtcgattttactttgctataatgtaaaacaaataagactatagcagtcgaatatattattatccttcggggtcgggtgtaagtcccaaccggcggtgataaagcgtatgcttttaagcccgtgacccgttttcatacgatgtatgttagcggtggatctagttaaagtctagagccgacagtaaaagtctggatgggagaaggatcaggaagcacagttgttttttttgtgttgaattaataaggggcacgcttgccttttttaaagctacccttgtttttgtacacaaaatataactgtttatttcgtatacaattagcggaattttgcatagataaaactgattcagctcagccgaccccttggacatttgttcaagggggttttttattttcagtggttgggggaaagataaatatgaaaaaaaagcagctgctatttcaaaacggtataagaaattggaatagcgccaaagcaggtgaagaaaatgttcacaggtatcattgaagaaattggaaaaataaaacgtattcaaaaggccacagaagcaattgttcttacgattgatgcgaagaccgtgttagaagatgtgaacttaggggacagtatttcagttaacggcgtttgtttaaccgtaacggcttactctcaaaatgaatttacggtcgatgtcatgccggagacgattaaagcaagtacccttcagcttctaaccgttggatcacgtgttaacttagagcgggcgatggctgcaaatggccggtttggagggcatttcgttagcggacacgttgatggaattggaaccattgtaagcaaaacacgtaaaggaaatgccttttattatgaaattcaagtcgatcctgaacttcgtgaatttatgatgttaaaaggatctgtttccgtagacggaacaagtcttactatttttgatgtcagcaaccaatcatttactatttctcttattcctcacacggtgcttcacacagtcgttggagacaaacagcgaggagacaaggtgaatattgaatgcgatatgttagctaaatatatgcatcagatgatgacaaataagtcaactcctggcgcctcgaatcgttcaggtaacatgaaggatttattgcagcagcatggttttacaaattaacagtgaggtgaaagagatgtttcataaagtagaagaagccattgaagagttaaaaaagggaaaagtggttattgtatgcgatgatgaagatcgagaaaacgaaggagattttattgcattagccgaaaaaacgacgcctgaggttattaactttatggctactcatggaagaggattaatttgtacacctgttaatgaagaaattgcgcataaattgaatcttcacccgatggtagcgaacaatacggatgcacatggcacagcatttacagtaagtattgatcatatttcaagtacaacaggtatcagtgcatatgaacgctctgctaccgttatggctcttgtaaatgaagcgacggtagcaagtgattttcaacgcccaggacatattttcccattgattgcaaaagacgggggcgttctgcagcgtgcaggtcatacagaggctgctgttgatttagcagtattagcaggaggaaagcctgcgggtgttatttgtgaaattatgaatgaagatggaacaatggcacgtgtaccggatttaacaaaaattgcagagcaatttgatttaaaaatgattacaataaaagatttgattgcctaccgccgcaaacatgatcagcttattagccgtgaagtagaagtgagcttacctacggcatttggtgagtttaaagctgtaggatatacaaataaacttgataataaagaacatgtggctcttatcaaaggtgatattgatcataatagccccgttctcgttcgcgttcactctgagtgtttgactggagatgtgtttggttctgaacgctgcgactgcggtcctcagcttcacgcagctcttacgcaaattgaagaagaaggacgcggcattctgttgtatatgcgtcaagagggcagaggtattggcttactaaataagctaagagcatataagctgcaggaagaaggatacgataccgtagaagcgaatgaaaaactcgggtttgctgcagatttacgagagtatggaatcggtgctcaaatcttaaaagaccttggagtcaaacaaatgaagcttttaacgaataaccctcgtaaaattactgggctaaaaggctacgaccttgaagtgatcgagcgagtgcctcttcaaatgccggcagtggatgccaataaaaaatacttagatacaaaagctaaaaaattaggtcatttattacatttataattttacactttttttcgttataacaaatgaagctaattcatgaaaagaaatgtaaataactatatattaatactagcaggaggaacaaaagatgaatcatttatatgaaggaaatttagtaggcacaggattaaaaatcggaatcgtggtagggcgttttaatgaatttattacaggccgtttacttagtggagcagaagatgcactcaaacgtcacggcgtagctgatgaagatgtagacgtggcttgggtgccgggcgcttatgaaatcccattaatcgccaaaaaattagctgaatctaaaaaatatgatgcagtgatcacgctaggaaccgttattcgaggagctactccacactttgattttgtatgtaatgaagtagcaaaaggcgttgcatctcaaagcttacaaacaggcgtgccaattatctttggtgtattaacaactgaaacaattgagcaagcaattgaacgtgcaggaacaaaagcaggaaataaaggatgggaagctgcagcatcagctatcgaaatggctaacctttcaaaaatgattgaaggataatagataccattccagtttttataagctgaagagttaaaagaggctgaaacaaaagtatgttagttgaaggaagatccgaacgatgaatcgttcggatttttttattggtagggtgaacgcaggtttcaggtatgtagtggcttctacctgtagattaaaaggtcaggcgaagactcctgcgggaaaagcgggagaagtgtgaccccccagaagcgtaagcgacgaggaggctcagcggccgcccgcggaaagcgaagtcttgcacggaaatcaactgcagtgtagaaagcgatctatactgtctcatgtatcccgtttgttcgcctttagattggattgatgtagttatatctcaagcttttttgaatagaagctagctatgtataatttagctaaaacgtcttactctaagtaataattaggtcgtaaaagggagacgtctatgcctcattatactgctttttttgcattgattattatcagcacagccgttttgcttacagtattcatacgtaaaaaagataaaaagctagtcgttttgctcttttttatcattggaatggcttatgtactagagtatgttgtatttgtggtgtttgaaagttacgattacgatcctgattttatgacccatgaatattttgataatttgttcggatccttaacttctcaagcgtttgcttttccaatcatggctatggtggtagctgcttatcaattgaaatttcgctatattttaatcatttcagctatgtttatggggattgaagaattatttttacactgggatatttatacacatcactggtggaaaacagtttatacaggcgctttaatgactataggctttagtatttcaaagatttggtatgtatggctaacagaacggtatatgacatttgtgcattacgctacattttttctcggaatgctcgccattacttctactattatgtttatgctgttagcatattttcataataattggttttatacgggatggtttgcgtcggctactcatgattccgtaaatgccacgatgatttacgtttgtattgttacgattctcctcgtttggagtgtagccaaagaattttttattggggctgggatgattatagcggggctgcgtatagtagatattttgctgattcactatggggtgttgctggtatctgttaccacttcacttgttctttttacgcttttacaagcgggtgtattcattctgagcgttatgcttcaaaactttattatgaaaaattgttatgggacgagcaaaaaagacgttgcgtttccagcgaagaactactaagataatacgtaactcaaatagtttagttcaataatatttgaaacaaagaaaaatgaattgacggttatgcgtattatttgtaagataggaaagcaaataatagaaagccgaaacaggggagtgaaggattcgtgaaagagtccttttttgtagaaaaggtacttaataataatgtattaattgctaaacaccttacctatgatgaagttgtgctaattgggaaaggaatagggttcaataagaaaaaaggcgatgaaatcgatgcaaaagccgtggagaaaatgtttttgttaaagagtgaagaagagcaagaacagtacaagcagcttttagcgcaagtggatgaagacgtgattgaaatgatgaatgatattgtaatgcacattcaaaagcgtgttaacattcctttgaatgagcatatacacatttcattgacggaccatatcgcgtttgcgataaaacgttttcagcagggaatggggcttaaaaatccatttttacttgaaaccaaagctttatatccagaggaatatacgatcgcatctgaagtggtagaaattattagtcgcaaaataggcgtgcagcttccagtaggagagattggttttattgcgcttcatatccacagtgcgctgactgaaaaaaacctgctggaagtgaatcaagactcgcagcttattcaaacgattattaatgtgattgaagaatcgcttcatctgcaggtagacaaagaatctgtgcactatatgagattgattcgtcatttgcattttgcgattgatcgagtaaaaacaggagaaaaaatagaagagccaaaaaaaattgctttgctattgaaagaagaatatcccctgtgttacaatgtgtcttggaaagtgataaaagtaatgcagcaagcgttacatttacctgtgtatgaagcagaagcagtttacttaacgatgcatctgcagcgacttataacaaaaacggatttataaaatcatttcaatacgtgttactgatacgatcaggcatgagtgagaaatgaagcgatgtgtaattggatgagtgtatccatttatcgtttctttttcctcatgcctttttttgttataagaaagcgcaatcatttaaagcttaggcttcaggacactaggagatgtaaggagttttccagttaaagaaagcgttttatgaaagcgcgttaatgattcacgtatcaaataaatagcttgttgcacactaaatatataaaaggaggtaagcgccatgtttaaaaaactttttggagtattacaaaaagtcggaaaagcgcttatgttaccggttgcgattttaccggcagcagggattttacttggagtagggacagcgcttcaaaaccctacattgttggatgcagtaccggcacttggtgcagactgggttcaattggtttcaaatgttttgtcacaagcgggtcaaattgtatttgacaacttgtcgctattgtttgccgttggtgttgccgttggtttagctggtggtgacggtgtagcaggtattgctgcaatcgtaggctacttaattatgaacaaaacgatgagcacaatcttagttgctacaggacaactagatcctgacaaaatgggtgccaatccagcttacactagcatcttaggaattcctacgttagctacaggtgtattcgggggtatcatagtaggtattttagcttcatccatgtataatcgttatttcaatattgaattaccatcttatttagggttctttgcgggaaaacgatttgtaccaatcattactggggtattttcaattgttttaggtgttattatgattttcatttggccgccaattcaaagcggattaaatgctttctctactaacatgattgatgcaaacccaaccttatcagcttttgtatttggattgattgaacgttcattaattccatttggacttcatcacatattctactctccgttctggtttgaatttggtgattacgttaataaagcaggtcaacatattcacggtgaccaaaagattttctttgctcaattagcagatggcgtgcctttaacagcaggaacattccaagttggtaaattcccgttcatgatgttcggattaccagcagcagctcttgcaatttatcacgaagctcgtcctgaaaacaaaaaatatgtagctggtatcatgggttcagctgctttaacatctttcttaacgggtattacagagccgcttgagttctcattcttattcgtagcaccagtactatttgcaattcacgcagtatttgctggtttatcatttatggttatgcaattattaaatgttaaaatcggtatgacattctcaggtggggttatcgattacgttctatttggagttatgcaaaaccgtacagcatggtggctagttattccagtaggcttagttctagcagttatttactacttcggtttccgctttgcaatccgtaaatttaacttgaaaacaccgggtcgtgaagataaagaagaaggagaagaagatgtaaaagtagaagcagcagagcttccaacaaatgttttagctgcacttggcggtaaagaaaacattacacatttagatgcttgtattacgcgtttgcgtgtatcagtagatgacgtaggtaatgttgataaaaaccgcttgaaaaaacttggagcagctggtgttcttgaagttggtaacaatattcaagctattttcggtccgaaatctgacacgttaaaaggtcaaattcaagacattatgaatggcaaaacaccggttgtcacaaaagaagagacaaaaacaattgaaaaacctgttgcaacatctgaagtaggaagcgataatggtaatgatattgtttcaccgattgagggagaattggtacctttatcggaagtaccagatcaggtattttcacaaaaattaatgggtgacggttttgcgattattccgaaaacaggcacagtagttgcaccagtggacggaaaaatagtaaacttattcccgacgaaacatgctttaggtattgaatcaacgactggacgtgaaattttaattcacgttggtattgatacagttaatttaaaaggcgaaggttttgaagctttagttgcccaaggcgatgaagtgaaaaaaggacagcctctattgaaaattgatttagactttgtaaaagaaaatgcgccatcgacgattacgccgatcattttcacgaatttacaagctgatgaaaaaattgatatcttaaagcagggccaagtttctcaacaagaagcaaatattattaacatttcaaagtaaaaaggagattgatttaacatggcacaaaaaacatttacagtaacagcagactcaggaattcatgcacgtccagcaacaactttagtacaagcagcaagcaaatttgattctgatatcaacttagaattcaacggtaaaactgtaaacttaaaatcaatcatgggcgttatgtctttaggtattcaaaaaggcgctacaatcactatctctgcagaaggttctgacgaagcagatgcacttgctgctcttgaagatacaatgagcaaagaaggattaggcgaataatgacaaaggaaattcaaggcattgccgcttctagcggcattgctattgctaaagcatttcgtctagaaaatccagaattaaccgttgaaaaaaaatcagtaactgaagttgaagcagaagtagcacgtctagaagctgcgctagaaaagtcaaaatcagaacttgaaattattagagagcacgctcgtaaagaacttggagatgacaaagcagaaatctttgaagctcacttattagttctaagcgatcctgaacttattaatccaattaaagataaaattacaaatgaaaatgtaaacgctgaacatgcacttgatgaagtagcggcaatgttcattaatatgtttgagtcaatggacaacgaatatatgaaagaacgtgctgctgatatccgtgatgtaacaaaacgtgtattagctcatcttttaggtgtaaacgtttcaaatccaagcttaatctcagaagaagttgttattatcgcagaagatttaacgccgtctgatacagcacagttaaatcgtaagttcgtaaaaggatttacaacagatattggcggacgtacttctcactcagcaattatggcgcgttccatggagatcccagctgttgtaggtacaaaaacagttatggaagacattcaaaacggcgtattagtaattgtcgatggtttagatggcgaagttatcgttgatccaagcgaagaaacagtaaaagcttacgagaaaaaagccgctgagtatgcagaacaaaaagctgagtgggctaagcttgtaaatgaaaaaacggtttcagctgatgatcatcacgttgaacttgcagctaacattggtacaccagaagatgtaaaaggcgtattagaaaacggcggcgaaggcgttggcctttatcgtacagaattcttatatatgggccgcgaagatcttccgacggaagaagagcagtttacttcttataaaacagttcttgaacgtatggaaggtaaaccagtggttgttcgtactcttgatattggtggagacaaagagcttccttatttaaatttaccaaaagaaatgaacccattcttaggattccgtgccattcgcttatgtctagagatgcaagacatgttccgtacacagcttcgtgcgcttctacgtgcaagcgtatacggtaatctgaaaattatgtttcctatgattgctactgttgatgagttccgtcaagcaaaagctattcttttagaagaaaaagctaaacttcaacaagaaggcgtacaagtttcggaagacatcgaagtagggatgatggtagagattccttcctcagcggtaatcgcagatttatttgctaaagaagtagatttcttctctatcggaacaaatgatttaattcaatacacgcttgctgctgaccgcatgaatgagcgcgtgtcttatttatatcaaccgtataacccagcgattcttcgcttggtgaatatggtaatcaaagcggctcacaaagaaggtaagtgggtaggcatgtgtggagagatggcaggagatgagattgcaattccaattcttttaggtttaggcttagatgaattctcaatgagtgcaacatctattctgaaagctcgttctcaaatccgtcaattatcaaaagctgatatcgaacctcatttagatacaattctatcaatgtcttctacggaagaagttattgagtttgtaaaatcaacttttcatattggataataaaaaggtgtgatcatatatgatcacaccttttttatcttttaagcgaaaatagtaggcagaagcatattcgcaaacagcattgtaagaagtgctgctacgatcatgccaaggctagaaaaagtaccttcaatttttccaaattcaaaagctcttgctgtacctgtcccatgagaagctactcctaaaagaagacctcttgctagagaagagtgcagtgcgaggagcttaatcagttttggagcgaccatacatcctactacaccggttataatcacaaacataatggtaatattcggatctcctcctagcgtctgagatacattaacagcaataggaatcgtaaccgatcttggaatcaagctatgaaccagcgttgattgtaaatgaaacactaatgctaacagcatggaagatatcatggcagcaaacgtgccaagccctacgcttaagctgatttcaacacggtgttttttgagcaaatcaaaatacttaaacataggaacagcaaaagcaacggttgctggtccaagcataaagctaatagcactggcaccttgcttataatgatcataagagccattcgtcactaataagatgccaattaaaagaatgggggctagtaaaataggggaaactagcatagacttatattttttatagagcacttttgtaccgacataaacgagcagtgtaagcggaagagcaatccatgtgagtaatgtcattttagcgaaccttcctttcttcttgaaatatgttctgcaatgattcccgttacagacatcacaataatcgtactgattgtgataataatcacaatctggattccgaaatgcatcaatacatctccataattgatgagtccaacgacggctggtatgaaaaatagtaatagttctcccactaacagtgttccaccttgttcaacccagcttaatttaattactttaaagtacagtaagaaaaacagtaagaaaaatccgatgatactacctggcactgggaggtcaaaccattgtgaaatactttctcctattaaaaacagagccgttagtaataaaatctgtaaaatcaccataatcagtttcatgattagcctcctttatttatgtttttattcattcatttctagtttgttgagacaataatggagtcgtctatgctgaaaagacgactccatcatgggaaaagagaaactatttggattttgcaaatggggatacaacttcagtaaatgaatgctacacacttatcttacaaaaaatcgactataatatgaaatatataataactatgataactattctttttagttatagttgaaagaaatctctttacaaatgcgttggtaaccttttcaaaaaagaatttgtgaaatataaggtctaattatttaataaaagagatggagacatgcctaaatcaattcaatttaaagacgaaccaatgggataaatgatttagtatgaatgacttattacaccgccatgaaaaaaatccgaacgagttggattttctatcaagaatcaaactcgttcggatttttaattaaactacttttgtctcagctttgttaaactgtacttttaatataatcaataaaagcctgtgtagcgtaagagatatagcgatctttttttacgattaaagcaatttcccacggaatagcattctcgagattaattactttcacatgctccaaatcaagcttttcacataatgaataagggaaaagagcaatgccgagattagcagctaccagctctccaatgaagtcccactgagagcttttaaaagcaatattaggtgtaaaaccattttttaaacattcgttatagaccatttcatgcatggtgaagtcttcatgaaaggaaataagcgtttcgtcttttaactcttttaatgaaatcgtagaatgctgagccaacggatgagatttatgaacaacaagctgcagtgtttctcgggctaaaggagtcgtaaaaaacatgttttcatcaactggaagtaaaactacgcccacatccacttctccttgttccacaaatttttgcatttttttagcgccatattccactaattgaatatgaatctcagggtattgctctcgaaatgctttaataatagtaggaaaaaacaatgtaccaataatagggggaatgcctattttgatggttcctctttttaaatgcattaaatcatagagggaatccgataaatctcggagagaagataaaatgctttctgcttgctcgtacacaattattcctgcatcggtaagctgaacttgtttgccagcgcgatcaaacaaaggtgtgccgagctcttcttctaatgatttaaccattttactgagagaaggttgcgaaatatgcagcgcttcagaagctcttgtgaaatttttatgtttagccacttctgttaagtaatgcaaatggcgaacatccattttgtatacctccgtgttcatacatgctaattaataagatacacacattctaccacattcacaatcagctctatacctttctttcctatcaaataaaatgatcagtagaagaggcagtgaatacaaaagaaattgccaacaatatatatttacacattgtttattttagaagtataatatataaatcagtagaacggttacatatcgatcacagaatcaatcaataaggtggttagaacggttgagtaaagcagatgaaataagagatatcgtttatattaatggccatgtaaataaaaaatgctttattacatatggaattgaatttaaagagttttatcattcccttcctacgccgcttgcaaatatattattgttaaagcacggttttgaagacagtgattaccattaccaaacccatatggactacgtagaagaagaacaaattcatcttttagcagaagatgatgtttataattatggtgatttttgttggattgattttgaggatgtatcttcgttagatttgttagaacctcaagatattgcagcgctgctgtatttaggtcatttaaaaaaaccgctcaattcgccatttaataataaactcggtaatcaatttgtttatttagctcatgatgatggattttataacaaaatctattttcgagacgtatatgatatgaagcatattttaagccgaatcattccgttgaaaatgtcagaaattaagcaaaaaagatttgtatttagaaggaagaagttagaatatccaatattgccgctcgtgttagcaaatacgcttcttactttaacgaatgacggtttgtttattgattttgaacacatggtgcaatcgcgtagagatattaaaattcctttgtatacaatcggtgactttgacgacatgaatgaaatgtataatgatcggtttgagcacaaagagatgagtaaattgcaggcgcatcttgttctcactcataaagagctagagtggagcattgaagaagttcaataatctaaaaagaggctgagacataactaaatgaattcaacctaaagacgaacacatgagatagatgagctggactgctagaaggaacgaaacagataaaactatattcaccatcacaaaaaaacgaaccaccaatcaaacgtgttgattaatggttcgtttttcacttgggctaaactatttttgtcccagcctctttttgaatagccgtataaaatggatttttccattccattagtacggcgtagttgtgtgaatcttcatcttcaatatagtttgctgcgagaccaataggcgatctgccacagcgcattaaaaaggtcataaccgggtcgtagagagttccagctgatacaaggtccatgtattcaacgggcgtgtacaaggaagacactgatgcgtatccagggatgcggcatccaccaagcagcctttctaacttgtaatgaatcacaacttcatataaagactgcaaaagcagcttcccaagccccatcgatcgatgcgaaggagtgacgcatacgtccactacataaagtgtattaccagaagggtcgtgcgtatgaatatatccgcttcctgttacttcatcccatgtgtgagcttcatttctttccactgaaacaatcgcgcttgtgatagatccgcatattgtcccgtctatctccacgcatagcgctccatccggaaaaagggacacatggttatttaactgatctttgctccataataattcagaagggaaaggaggggggaagctttcttcttgaatccgaatcaactcatcgaagtcatttgatgtatatgatcgtaccgtacatgttacaggcttattttgatgaaagacaaagcattgctttttatacactgcttttttgcctcctttaagaaaaaattttcagataattaagtataccatatgaaaaaaagaaattatttcatatttattgaagaatttgaagagaacgtgataaagttaaaaagattcgaactattagacgaggtgaaagaaatggatgttgaattaaaaggaaaaacagcgcttgtatttgcggcgagccaagggcttggcaaagcgattgctgccaggctcgcagaagaaggcgcaaacgttatgattgcaagtcgttcagaagagaaactaatccaagtagcggaagagatttcataccttggaagcggacaagtgttacataaaacggcagatgtcacgaaaactcaagacattcaagatgttattcaatatacagtagatacgtttggaaccattgatattttaattaataatacaggaggtcctaaagcagggaacttcctttcgttaacagatgatgattggaagcgtgcatttgagttaaatctcctcagttatattcgtatcattcgtgaggtagtgcccgttatgaaaaagagcggaggacgtattgtcaatattgcttcttcttccattaaagagccaattgctggacttattctgtcaaataccttccgtacaggaatcgtggggcttaccaaaacacttgcttcagaactagcagaggacggtatcttaattaacacggttgccccaggaagaattgcaacagaccgagtgaaagagctagataccactcgtgctgaaaaaatgggagtagacgtttcaaaaattgaagaagagatgagaaaccaaattcctcttaagcgctacggtcagcctgaagagtttgcaaaagccgttgctttctttgtctcgggagcaaattcatatatgacaggccagtcgtttctaatcgacggaggtatggtgaaatccatttagttaaatagaaaaaccctgcagccgcagggttttttgttaaatccaagttgtaacttgatctaatggtaaacggtcgctagcgtgtgcttctttagccgcttttccaactgagataagcataactggaatgtatcgatcctcaattttaaattcttctacaaatttttgagcgttaaatccgcccattgagcaagtgtctaatccttttgcttttgctgcaagcatgaatgtcatagatgcaagagaagcattcgtaaacgctgcatcgcgggcgaaagcaccgtttttataagcgccgttaatttgtcctgacaaaatattttttacgtcttctgtcatgtgacctgcttcgactagtggattgtacacgtcatctacatttttattggcttctaaatcacctaagacagctactacagcgcctgcttctgtaatttgtttttggttgtaagcaattggaagtagacgttctttcgcatcttgatctgtaataacaacgaaatgccagtgctgtaagttccaagctgatggtgacttcactgttgcttctaaaagttccgttaattcttctttggttaatttagctgaagagtcatattctcgaatcgatgtacgttcatttaccacatcaaaaaaatcttttgtcataataaaaacctccgttaaaagtatgtatttctttagtgaatcgatgcacattttataatgatacactattgaagtcaatttatatgcttctagtatacccgctcttatgtgctgtcactcacaaaaaaatgcatacacttcttaccatcggcttagcgtgattgacgagatgtaaaataagcttcaattcgatcacaggcttcacgcagcgtgttcatggaatacgcatacgacaggcgtacatatccttccccgtgggaagaaaaagcgctgccgggtactagtgcaacacctgcttcttttactaactccagggcaaaatcaaatgaattgctgtggaagttctgaatagaagggaagatataaaaagcacccgtcggcttttctacgtcaaatcccatgtttactaatcggtcatacacataattcagcctttgttcgtattcttttttcatatccaccgcatcgtttttacctgctgtcagtgcctcgagtgcagctgcttgagagacagaagaagcacagctcacgttgtattgatgaacttttaatatatgtttggctaaataagaaggagcaaataaaaggccaattcgccagcccgtcatagaatgagactttgatactccgttaataacaattgttttctctctcatagaggaaatggaggcaatggactgatgttttttatcaaaaacgagctcgctgtatatttcatcagatagtacaaaaatatttttatcgcttaaaagagcggcaatttcttctaattcttgctgggacaacgtcactcctgtagggttagacggataaggtaagatgacgcatcttgttttagacgtcagatgttgttggattaaatccgctgttagtcgaaatcctgtttcggttgtatcaatatgtacaggtttagcgccgtttaaccggataagcggttcgtatcctgggtaaacaggtccaggtaaaataacttcagaatcttcttctaaaatggtgcgaagagcaatgtcaattgcttgactagctccaatggtcacaatcacttcatccgctgggttatagtgcaagtcatatttttctttgacaaattgagctgctgcctcgcgcagttctattgttccagcattgtgggtataagaagtttggttaccatcaattgcagattttgccgcttcttttacatgctgtggtgttaagaaatcaggttgtccaattgtgagggataaaacatcttggtattgtgagaccatattataaaatgtacgtattcctgatagttcaatttctttgacacgtttattgattaagtgctccatggtttcaaatccttccgcgtattttcaactcattttatcttatcacaatgaaaataggtaaaaaaccactatttgcgcattttgcaaatagtggttttaagttaggcgttatatagcttattataagcagttgttagttcataaaattgttcttcgtctctgttatctaacgcatcgtcgataagagatttcaaatgctgtttattaaagtttgtactcatagtcgttaaaatacgatcagcttctttcgcgtaatagtgttggtaaggtgtgtactgagatgagtgaggatagtgattcatatttttgcgataagaactcataacataaacctccttttttaaaataaaacgcagcttctattacttgaaatgtaccctttctatatagttgttaaccctgtttttagctgcgaatgtgctgaggtatgtgttaggaaatcagaggttcctcgcttcacgttcaattctagattcaaaataataagcgcataaaaagacctgcatatatatgcaggtcttgtatattagtcagtgtgtatttggccttcacgccaataaacgggggaaacgtagccaaaatcaacttcatgatcgtccaatgttacaacgcagtgatcagagccttcttgttctttaatatcttgatatacagcttcttctacgttttcaataatggtcatttcattatcgtcattaaaaagaatgacggagcctttcatattacgaacaccttcttttaagattattcattcactttgtgtagtataaaccgttttggctgtagagtccacagctatcttcgatttcttgttaaaaatttgtgaacaggcttttaggaatgaataagaaaccctctaaatagaagagtaaccgacttgtctattctttcttgaagggtagcagagtcgggttggttggtacaccagtaaagaagtgtgccaaaaaaattaagtatagcaatagaagccatttcttcggcagggatatcgactataagttcacctcggtcttgtcctgtttgaaaaacttttgtaaaatgagcacgcattttttcaatttgaagaatttcggattgttgaaaggaactgttggtaatagcaatatgaaaccaagaacggattaggtgagggttcgcttcttcgtttgattgtgctagtaataaaaacagttgtttaacaatggcagcagttgattcttctgtttgaaggagctgttctaatttgtaggagatacggtttgtaaaattaattccaaggtagtgaagaacttcttcttttgttttgaagtaattaaaaaatgttccctttgctacacccgcttcatgggtaatttgagacacagtcgttttttgatatccctgctgttggaataaagagatagcggctttttggatgcgtttttttgtttcttctttttgtaatcctctgttcataaattacacctcgttcgaataggagtagtcgtttgactcaagttcataagctagtatagagaagtaaagtagagcaattaaaaaactgagcagaggatgagacgaaagggatcggcgctcatgtttttatatagtatataatattctgttaattcataaaacaatattttatgtatatgttttagggaaaaaggataacaaaataagaaaatttttctttacggatataagaggcgctcactataatgggaaatatggactattagataaacaggtgagatgagaggagtaagtatatgaatccagataaaggaatactgttggaaagtggtacaaacgaactggaaattgtcgaatttgagataggaaatgtttggtttggcattaatgtagtaaaagttagagagattattaatcccgtatctattacacctgttcccaatgcgcattcttacatagaaggtattatagagctaagaggggaagtacttcctgttgttgacatagcaaaagcattaaaaatggaaccttcaaatacgccggaaaaagataagttaattgttacagagttcaatcagcaaaaaattgtctttcatacccatgcagtgacgcaaattcaccgtatttcttggaaagaaattgagaagccttcagatttgtatcaaggtttggaaacgcagattactggagtggtaaaattacacggtcaaatgattctgctgttagactttgaaaagctgatttctgacgtgaaccctgatgcgggtattaatcagtcgaaaatcaaaaagctaggggctagggagcgctctaataaaaagattgtcgtagctgaagactcaccgctgctgcgccgaatgattgaagatactcttgcacaagcaggttatgagaacacggaattttttgagaacggtgaggaagcgtggaactatctgagctcagtgatcgatgaaggtgtggaaatcagtgatcaagtccagctgcttattacagatatagaaatgccgcaaatggatgggcatcatttaactaaaaaagtgaaagaaaatcctcagctttctatacttccagtcattatcttctcttctcttatcacagaagatttacgtcacaagggaaagatggtaggagcggaaggacaagtaagtaagccggaaatcggagagcttgttgagttgatcgatctctatattttgtaggatcacaaaaaagtgcctgaaagcagattgctccacttcaggcacttttttaaaaataacttttacccagcggtttaaacacaggtgcttgccgttttcttggagtcgaaacagggcttttcgccggctgtacgagatgacccgtatatttagataataagcgcttcgcataagataatgacatagtcgttttgggatttcgatactgatggtttaaatggccgaggtgtgataactctttgaagtcttctttctttggaggcatatggaaaaagtagtctccaactgatacaagtacatctgatttttgttgacttttaccagggtttggcgaaaagtgaagtccttcttttttggcttttccttctaaaattagttgatctaatgcaattttctttaacgtatataactgcttaggatcaggagcagcttttgcgtgacgatttacagtgaaaatagcttgtgcaatctcagatacagacggggtcaaagagccttgtccatttgcttgagacatacgttcactccctttctatcatatcagctgttcaacctataaggtgaaagctgatacgttcattatagcgtgtcttgtcccatttgaaaataattacacgaagaagtattttggtaattaatgaaatttcctatgtatagggtttgttttgttacgcttccttatacaagtaaagtggaacagcacgccatactttctattttaaaaaaatgctgctcccacagttaaaccatcattgattagtaaatcccgaactattgagccattcgtcgagaaggtcgaatataaacaccagtcccatttggcacaatttgagctagctcatttacttgggcattatacatgcgaatgcatcctttggatacggcttttccaatagaacttggatcatttgttccgtgaatgccatatgactttttagacaagcttagccacattgtgccaaaaggccccccggggtttggctcccggttaacgataacaaagtctccagtaggggttgtgctcagcatttttcctgctgcaatgggatagactttttgtatgatattatttcttcgtaattcaagctgcttttcagcaataaacacgtggatcgtgtaaggaatgagctctttatcagggaggtttggaatgatgattacttgcccaggcttcagcgtactatggcttacaaaaggattagccatccacagatcttcaaccggagtccggtagtcacctgaaacgctttgccaggtttcaccgcgctttactatatatctcattaacttcgctcctttgatatatgactatgttgtaacagtatacggttgaaaaaagtaaaagtgacctttgtgagcataaagttattttgaaaaaggtgttgaaattacattgacttataaacatggactgattgatataggctcaaatacgatacgccttgttatttatgaatacaaaaaaggcagaggatttaagcaagttgaaaacgtgaaagtagctgcacggcttcgaaattatttaagtaaagaaggaatgttaacggctaaaggaatatataccttgcttgatacgcttaaaacgtttggagttattatcaagcatcagcagctgccgcacgttacctgtgtggccacagctaccattcgtcaagcggctaatgcaaaagaagttctagatcttgtaaaaaaagaaacgggcttttctattcaactattgtctgaatatgaagaagcatattacggctttgttgccgttattcattctacttcgatcgaagaagccattacaattgacattggtgggggaagtacggaagttacgtattttcgcaatcgagagttagtgcagtaccacagctttccgttcggtgccttatctctgcgtctgcagttcgtcaaaggcaatattcccactgcagaagaaaaagtaaaaatccgcgatttcctgatccggtatttccatgctgtcccgtggcttttaaatcgccaagttccgattgtggcaattggaggaagtgcaagaagtatggtgcaagtgcatcaaggttttatccactatcctctcgccgggctgcatcaatatgaaatgaatttagctgatatattgcatgtgaaatccgctataggctcattgtcttatcacaatcttcaaaagctagaccgcttgtcaaaagatcgtgcggatacaattttgccagcgattgaagtatttcaatcattatatgaaacagtcaacgcgactcgcttcatcttaagtcgcaaaggcttaagagaaggggtgttatttaaggaagcgtctgatgctaatatccagccaatgtaccccgatgtcatacagcaaagttttcaagaaataatggaagagtttgaaataaataaagattatgtcaaacagcttacccgcacagctattatgatttttcagcatcttaaggagcagggaccagttgatttaaaagaggatgacttagcgcttcttataaaagctgcgcaagtgtatgatataggagagtatattgatgcggaatcaagcagccagcatacgttttatgtgcttgctaatcgtacaatcgatggaatttcacataaagaacgtttaaagctggcacttgtttcttcatataaagggaagtcttcttttaggcaatatgttgctccttttaaaaagtggttaacaaaaaaagaacaaaaaaaagtccagctgctcggtgcggttttaaaaatagctgacggtttacatgcaacaaagcgaaatattattcaacatattgacatgaaaagcgatgaaaacacagttacgattaaactattatgtacaaaaacctttcgtcctgaacaatatcaggctgaaaaacagaaaaagcatctagaaaaagtagtggaaaaaaatattgttcttgaatttgctaagctttagaataacgctgaatcggttagaatattcagtatagctaactagattaaatccattatcctggaaggtgaggctaatgttagaaagtaatcgcacttataagcaaaccatacaagtggctgattcagcttattacaataatcgtgaattgagctggctggcttttaacaagcgggtgctggaagaagcagtagatacgaaaaaccctttgcttgagcggtttagatttctaggaattttcagttcaaatttggatgagttttttatgattcgggtagccggattaaaagatcaagtgaaagctggatttagcaaacctgaaaacaaagcaggcttaactcctaaacagcagctattttctatctccaaacaaaaccacgatctaatcaagcagcagtatgatacgtatattcatacacttcttcccgaattacagaaatacggcgtggaaatcattgcggttgaaaagctggagaaatcaaatctagataagcttgaacagtattttgacgagcaaatctttcccgtattaactcctatggctattgatacctaccggccgtttcctatgttgatgaataaaagcttgaacttagcagtcgtcctttcagaaaatttaaatgatgagcagcaaattgctgaaataaaaggaaggctagctatcgttcaagtaccttcgatgctaacgcgctacattgaaatagccacatcagattctacccgtctatttgtattgctagaggatgtgattgcctattttattaagaagttgtttaagggatatcgcgtttcttccgtttctcaatttcgaattacccgcaacgcagatatgactattcacgaagaagacgctcaagatttactaaaagaaattgaagaagaattgcagaagcgaaaatggggagcggctgttcgtcttgagattaagagtccatatgatcagggtgtactagcgtatttaaagtcagtacttgaaattgacgatgaagatgtgtatgagatcgaaggacagctggatttaaccagtttattttcgttttatagattacttaaatctacgcatgaagagttggctgaaaaagcctttattcctaagcttacaacagagttacacccggatcaaaatattttcgatcaaatgattcaaagagatattttgcttcaccatccttatgaatcgtttaagccggtactcgattttgttaacggtgcagcagacgatgaaaatgtgcttgctattaagcaaacgttatacagggtaagcggagattctcccgttattaaagcattaaaacgagcggctgcaaaaggtaaacaagtgacggtactagttgaactaaaagcgaggtttgatgaagagaataatgtgcaatgggctaaagagctagagcgggcagggtgccacgtgatatatggaatgacgcatttaaaaacgcatggtaaaattacgctcgtggtgagaagagaaggagagcatattaaacggtttgttcatcttggtactgggaattacaacgatgccacagcaaagatctatacggatataagtctttttactgtcaaccgaaacatcgggatagatgcggccaatttttttaattacttaagtggctatacgcaaaaaccagtatatcatcatttatccgttgcaccatttgatataagaaatgattttttgcacctcattgatcaggaaatccattatcatagacggtatggcaatggaagaatcattgggaaaatgaactcattgacggataaaattttaattatgaagctatatgaagcttctatagctggtgtgacaatcgaactcattgttagaggagcgtgctgcttgcgccctcaaattcaaggcgttagcgagaatataagagtaagaagcattgtcggacgatttttagagcatagccgaatctattattttcatcataataaacaggaaaagtttttcttttcatctgcagatatgatgacaagaaatatggtgaaacgagtagaaattttatttcctatcttggatacacatttgaaaaaaaaagtgtggaagtggcttgaagttatgcttgctgataatgtaaaagcacgagaacaagaccaagaagggaattatcattacgtcataaaaaaagaccatgagctctctattaatagtcaagagattttttgtcaatatgctctttgcgacgatcaagaataacataaaaaaagccgagtgctcggctttttagtcatgttattatctaggaatgggaccaacaggaccgtatccaggtccgtagtatgtgttataaacaggagcaccgcctccatagccggcaccagggtagcctcctccaggaaatccaccgccgtaaaacggaactggataaggataaggtggtggacagcacccaggtctgcctccaaaaccgccaacagctagtccgccaagcagcccaccagctaagccagcaacaaaaggaaatccaaaaaagcgctcgtcgccatttggaatattacgatatcctgtatagggatattgatagtacatattttaacctccttgtcagttgtctttgtagtgtatggctgaacagaagtttttgagcctggtttatttctttaagactagaattaggcggtcatgatcagctaaaaaaagacaatcaacataaaaacgccctgtaagggcgtttttatgttgattgcagggtgaaaagcgtaatttcaggcgtagctaaaaaacgaaaaggaatgcgagtggttcctaagcctctattcacataaagcttcattttagaatctccaacttcgtacattccttcagggtaaaccgtcccaaagggcggtgtaatcaaaggaccgtaaaaaggaatttgaatttggcctccatgactatggccggagagctgaagatccactggaaaaggagctgctttgacagcaacgtcaggttcatgaatcatagcaatagaaaaaatatccggctgtaattgccctagtgttccttcatattgtggattcccaagcataatatcatcgagtccacaaatatgaatgtagcttttatcaggcatgaataccgtgtcaacttcatttactaaaagtctaaatcctgcgtcttcaatggcttgtttatagatatttgttccatatcctccgtgatcatggttaccatatatggcatactttccaagaggagcctgaagcctctgtaaaatcgggggaattctttctggatgtgggtattcattaggtacatccattaaatctccggtaaataatataatagtaggcttcaaattatttatggtcaccataagctgttctagttgtaataaatcataagagagtccaagatgaatatcactaaattgtaaaatttttattccgttaaagcttttcggaatatttttagaagtaattgtatgacgaacaatttgcagacgtctaggctcaatatatttggcatatgtatacccaaaagacgtggtgagcaaagaccctaacgaaatagacgctagtcctttcaaaaaagatcgtcttgtatacgtctttttcatgcaaaatcaacctattccttatagttttcaagttttaattatagcattgttttttttatcctcacaacgagaagtctgcttttaagttaaatagataaaagtttcactttattcagaaaaaatagtaaaatgatagttgtacaacacttatgttttggggaggaatataaattgaagaacaaggtcgtaattgttactggcggttcaagtggcatgggaaaacatatggcgaagcgatttgcagaacaaggtgctcatgtggtaattacaggtagatcagccgatcgattacaagagacagaaaatgaaattaaaacgtttgatggacaggtactttcagtggtgatggatgtacgcaatccagaagatgtggagcgcatggttcaagaaacggacaaggcatttggacaaattgattttttagttaacaatgctgcaggcaattttatatgtgcagctgaagacttatccattaacggatggaacagcgtaattaatatcgtattaaatggtacattttattgcagttccgcagtaggaaaatattggatcaataaaggcgcaaaaggggccattacaaacattgtagctacatatgcctggaacgcaggagcaggtgttattcattcagcttgtgccaagtcaggagttttaaccatgacgcgcacgctcgcagtagagtgggggaagaaatatggtatacgagtaaatgcgattgcaccggggccgatcgagcgaacaggaggagccgataaattatttgagtcagaaaaaatgaaagcgcgtacattggattctgtaccattaggacgccttggaactcctgaggaaatagcaggattagctagtttcttattctccgatgaagcgtcttatatcaatggggaatgcattacaatggacgggggacagtggctaaatcagcatcctttttaagtttggatacgcactaaaaagtacaaagcaatccgagaaggactagcaaaattatgctattcgtattatactaacgtaaagtgaacaaggagaggggagagttgagtggacccgttagatgtattaacaaacatagagaaaactcttccgtattatcaagcaatttttagtgcagatggacatagagtaattggctatgaagtgttggcgaggtttcaaaatgaaggggaaattgaaagtctcggcccattctttcatgatgatgcgattccggatgaatatcgcatagaagttgattatgctgttttaacacaagcgctcgagcatatgttgacccaggaagaacaatttttaatttttattaatcagaaccctaatttattaatgaacgatcatggagaatccttgctggaattattgcaacttttcgaaaataaaggattatcgcttgatcgaattgttctcgaaattacagaacacaattttagtggagatttggaatcacttcaacacttactaaagtattatcaaacatatggtattaagattgcaattgataatataggaaaagaaagtagtaatctagacaggattgggttgctttcaccagatatcttaaaagtagatttacatattctgagacaaacggacatggcgcagtcgtatcaagacgtattgtattctttatctctgttagcaagaaaaatgggtgctacgcttctatacgaagatatagaagcctcctatcagctgcaatatgcatggagaaacggaggcaggtattttcaaggttattatttacataagccggctgctgaacttgtcgatcccaacatcttaaaggataaactaaaggaacgttttgaaatgtatatcgctcacgaaaagaaaaagctgcttgctgtttaccagctgacagaacgttttcaagataaaatgcagcaggtaatgacaaagtgcagaaagttagaaacgtatgacgatatgctgcctgttattgcagaagaactatccaacgtgtgttttcgcctttacatctgcgatgaaaatggatttcaaaagtcttctaactatgtaaagaaaaacgaggattggattcttgaacctgaatatgtaaagaaaaattggagctggcgcccatattttcttgagaatattattcgaatgagctatgaaaaaaaaggcatattatcagatttgtataatgatattgaaacaggtgagaatatccgaactttttcgtatccaattgataatatgcactatatattccttgatatttcatattcttttttatacgaaagagacgttttgtagagaataaataagttgaagttaaaccggcaaccagcaaaagtggttgccggttttttatgttttttttaaaggagaacgacagtcggttatagggatatgcataggcaggggaaatttcggaattctaataaaaaagaagttaaggagctgatttaatttgaagaaaatatgcttacttgtctttttgctgattgtcttgtactcaggaaaatctgttcatgcagaagtatcaggagagattaggcatgaaatctttataaatttgcaggacgcttatcaggctcagctaagagctgcgtctgcccatactaatcaagacgctgttcgtgagctgaaattgtttttagatgatgagtatgcatctgtgttttttaatgaggctctcttacaaaaagctcaagggtatgtcggagagggacctgaatatttaacacattacatccctttcttttcttttgatgaacagacgaaggtagctcttcattccgaccaaaacaaagcttatgtctatcaattttttccggctgtgcataatgaacgggtaaaataccaagatcattacgaaatgatcacgttagtaaaaaaacaggggaaatggaaagtgcaaaagtttatatatagtaagaaacactcaaaatagccgaggaaagcttattttgagtgtttctgttatccgatgttaagaagcttctcaagcgcttgaaggtcaaatcctctgataatttcctggtcaacacgaatggtcggagtggaataagactctaactcagtagtcattcgttttcgagcagaagcatctttagatacgtcaaattctttataggaaacgtgatgatgctgtaaaaactgtttaacaatttcgcaaggtgggcaagctggttgtgtgtacaactctatagatctcaatgaaagcacctccctatattaaaatgaatggtgttaaagtagaatgaagttttgtatgatacatagtatatcgctatgttattataataaaaaacgacatatatcgctataataaggcattttcttatgaaaaatcacgtaaagtacttgtgtttttttagtatgtggcatatagtgaaatggtgtcttttaagtattagtttagataacgtatttatttgaattgatattgtagaaaagtcgaatgcgtaatgatgtaataggtgaaaggagagattatatgtcacaattacaaggtattttaactcgtcttgtgaatctccgtgagcaagcaagtggaagtgaagcgccacaacgcttcttcgaagtagagggaaaaagaatttgcagcgtgaaatatcatgcaaaaactgaaacatacgaacttgaagtatatcaagatggtgaaaagccagccgtttatcaatttgataacgttgatatgattgcaattgaaatttttgaacttattcattaagggataaagcaaaacgaatgccgcaaaggattttatactttgcggtatttttttgttactgcgtatggagtttttgcggtggcttccgccctattttcccgagaaatatcgacaaagtgatagcggattttctgataaatagaaggaacgggtcgaatgctgtaaaaaaatcaaaataaaaaattcagataattatgaactttcgttgacacttgttttaaaaaaatctagacttaacatataagggagaacatcgattgtgtctgtttctattccctcttaaagattcgcatttacgtaagcaagctattttcattttgtagcttgttctttttctctttacacacgtggaagttatgagaaatggaaggagaatgtataaatgattgatattgatcacaatcagttaaatcaaattgaacttcgagatttgcttgtcacttctgataaagttgctcatgttcaagtgggaaataatttagaacatgctttgcttgtgttaacaaagactggctatacgtccattcccgtattaaatccaaggtttcagctgcaggggttcgtgagtatgacgcttattttagattcgattttaggattaaagcgcattgaatttgaacgattagaaaccatgaaagtagaagaagttatgaatcaaaatgttcctcgtgtctccatgaaaaaatccgtattaaaagtcataaatgccatgattaaccatccttttttgtgcgtagagaatgaagatggcatttttgaagggattttaacacgaagaaatttgttaaagtcattaagaaggcagtccatcattctcccgaaagagttatttcaataatttttttaagaaatcgtgtttcagcctatctttctccgtttttttcttatatgataaaggtaaaatgaaagtaaaaagaggcttgaaaggaataactgaatgcaattaatagaatgtcgaatgctcgttgtattagctcaagaattaaatatgagaaaagctgcagagagattatttgtatcacaaccagctttatcacagaggctgcaaaccattgaaaaagcatgggatacacaaatcttcattcgttcgcaaaaaggactgtcattaacgcctgctggagaaaagattgttcaatttgcaaaagaagtggtagaaaaagaagatcgggttcgtgaggacttgcatcatttagataatgaggtatatggtacactcaaattagcggtggcttcgattattggacagcactggctgccggcggtgttaaaacgctatatggatcgttacccacatgctaaaatctctcttgtaaccggatggagcagtgaaatgcttcgctatctgtacgaagatgaggtacatattggaatcatacgcggaaatccggattggaaaggtgtcaaagaacatttgtttacagatcctctttacctagttgattcagaaattgaaagggcagcggaagtagtaaatactcatcgaccatttattcaatttaaaagtgactcaacgtattatcaagaaattttagaatggtggcatcgagagtttcatactacaccgaagcgtacgattgtagtggatcagattgagacgtgtaagcaaatggctttaaatggtcttggcttcgctattttaccatcgattgctattaaagaagctggaagccatattcaccggacgccgcttctgaaagcaaatggagagccaattacgcgagacacttctttagttggatatgaatcagcgtttaagctgaagcaagttcgagcatttgttgatattgtacgtgaatatgtaagagaaacggtctaaagcgagcctagatgctcgctttttttatttgcaatcgttatctttttattaaaacgataatgatgcttgtcattgtgaaagcattttgttacattaaatgagacattgcttacttaggaggaatacataatgaaaatgatggatgctaatgagattatctcatttattcaaaacagcacaaaatcaacaccggtaaaagtttacgtaaaaggtgaagtagaaggaattgactttggttcatcttctaaaacattcgtaacgggaaacacaggtgtagtatttggcgaatggaaagaaatcaaagctgctattgaagcaaacgaaggaaaaattgaagactacgtaattgaaaacgatcgccgcaactctgcgattcctttattagatatgaaaggaattaaagctcgtattgagccaggcgctattattcgcgatcaagttgaaatcggggacaacgctgttattatgatgggtgcatctattaacatcggctcggtgatcggtgaaggaacaatgatcgacatgaacgtagtacttggtggtcgtgcaacagtaggtaaaaactgtcacatcggtgcaggttctgtattagctggtgttattgagccaccttctgcaaaaccagttgtagtagaagatgatgtagtaatcggtgctaatgctgttgttcttgaaggtgtaacagtaggtaaaggtgccgtagttgctgcaggtgcaattgtggtagaagatgtagctccttacacagtagtagcaggtacgccggctcgcgttattaaagaaattgacgaaaaaacaaagtctaaaacagaaatcaagcaagaattgcgtcaattaaacgaagaataagaaaaacaatcggtttgcgctttttctttgctgaattaataggttttagcgattgggatactgaatccttgaacgtatcatagggacaagttggaagcgtgggcaaccacgctttcttctttatttcgtgaggaggacatacacatggctgaaaatgaatttgtgaaaataagaagagagctacataaaattcctgaattagggtttcaagaggtgaaaacacagcgttttttgcttgattatattaaaactcttccgcaagagcgcttagaagtaaagacgtggaaaacaggactctttgttaaagtacatggtaaaaatccaactaaaacaataggctaccgagcagatattgacgggcttcctatcacggaagaaacgaattattcttttcaatcacagcatgaaggacttatgcatgcctgcggacatgatatgcatatggccattgggctaggcgtactgacttactttgctcagcatgaaatcaaagataatgtactgtttatctttcaacctgcagaagaggggccaggaggagcacagccaatgctccaaagcgatatcatgaaagaatggcttccagatttcatcttcgcccttcacgtagcgcctgaatatccggttgggtcgattgcgctgaaggaagggttgctatttgctaacacgtctgagctatttattgatttaaaaggaaaaggtggccatgctgcttatccacatacaacaaatgatatggtagttgctgcatgtcagctcgtttcacagcttcaaactattgttgctcgcaacgttgatccgctagacagcgctgtaattacagtaggaaaaattcaaggcgggacggttcaaaatattattgcggagcgagctcgcatagaaggaaccattcgcacgctatctcctgaatcaatgacgcgtgttaaagaacgaattgaagcgattgttaaaggagtagaagtggggtatcagtgtgaaacagccattgattatggctgtatgtatcatcaagtatataatcaccatgaagtcacgcgagagttcatggaatttgccaaagcgcaaacgaacgtggatgtgattgagtgcaaagaagcaatgacgggagaagattttggctatatgctaaaagatattcctggatttatgttttggcttggcgttcagtctgaatatgggcttcatcatgcaaagctgcagcctcatgaaggcgcaatagacattgcgatttcacttattacaaaatattttgaacataaaggcaatcaataaatcgtataatcatttttccttatggctaaattaataccatgaggaggtgggcaacgatggcacgaattggtgtagaatacggtttaacagatgtacaggctgcacttcagcagctcggacacgaagtggtacaattacgcaacgaaagtgatgcacaagggtgcgattgctgtgttgtaacaggacaggattcaaacgtaatggggatttctgatgcagtaacgcaaggctcagttattacagctagcggattaacagcagaagaaatttgtcagcaagtaggcaacaaggtacaaggataaaagaaagccgaaggatataaatccttcggctattttttatgcatgctgaggctgcttggcatcttcaggctgctttttatcaatatttacttgatgagggaacggaatatcaataccgtttgcgtcaaacgcttctttaaactctttgcgaagctgacgttcaactccccactgttcaccgtttttagctttgccaactacacgaagcacaacgtccgatgcgcctaggccttgaactcctatcacgtttgggccttctacaatgttttcatttgttgcagcaacgcgctcgcatactttttctagtacggaaatagctttgtcaatatcatcatcatacgaaatgccaatatcaatcaacgcacgcatattgccccgggaatgattgcttaaacttgtaatttcacggttaggcacatagtgtagagttccatcaaatccgcgaatttgagtagtacgaagacctactgattcgacaattcctgaaaaacttccggttgtgacatagtcgtcaacatcaagctgtttttcaagaagcaaaaagaaacctgttacaacgtcgctaaccagtccttgagcaccgaacccgattgctaggccaacaactccggcaccggctaataaagctgtggcgtggatatttactgcttcaagcagcatgacgacaaaaataaaaataagtacatatgaaaacacattaacggttaaacttttgagtgtgagcatacgtccgcgcgtagcattttcgcgctcactcattttttcaaaggaacgttcaataacttttttaccaattgctcgtacaagtaaaaacacaatggtaatggcaatgagttttaacacaataactccagcattggtaagaagctgttcccagttgatgtcttgcatcttaaacattaattgttcatccttcctatgttctgtttcaatattaataagtgggaatttattctctggaaaatattttgtaagagtatgagcacatttgtttattcccgatattagacatgctaaactgagaaggtaaataaatgcaacccttttatagcatttttttgctgaagtcagggtttaatttgccctaaaggcgggcataacaactatattgccattataaggtgttgtttaaattaattcttaattaatattgactaaaaaaacaatatccattataatgaaaaccgttataacagtacataagtgagaatgttttatacattttctcatttaataattatttggagggatcatgtatgccagaacgtatggtaggtaaacaagctccacgctttgaaatggaagctgtattatcaaacaaagaattcggtaaagttagcttagaagaaaatattaaaaatgacaaatggacagtattattcttctatccaatggactttacatttgtatgtccaacagaaatcactgcactttctgaccgttatgatgagtttgaagatcttgacgcagaagtaatcggtgtttctacagacacaatccatacacacttagcttggatcaacactgatcgtaaagataatggtttaggtgatcttaaatatccattagcagctgatacaaatcacgttgtttctcgtgagtacggcgttttaattgaagaagaaggtgtagcacttcgcggtttatacatcatcagcccagaaggcgaattacaatattcagttgtaaaccacaacaatattggccgtgacgttgatgaaactttacgtgttcttcaagcgttacaaactggcggactttgcccagctaactggaaaccaggtcaagctactttaaacgcgtaagcacaacgtttaaaaggtctaacgtccacgttaggcctttttttcatcggataataaagaacatatagttaataatagtgaaaataagggaggcttttattcatgaaattacgtcagccaatgcctgagttaacgggcgctacagaatggttaaacggagaggttacaaaagagcagctaatcggcgaaaagccaacgcttattcatttttggtcagtaagctgtcatttatgtaaagaagcaatgcctcaagtaaatgaatttcgcgaccagtacaaagatcaattaaacgtagtagcagttcatatgccgcgctctgaagatgatttagacttatcaaagattaaagaagtagcagcagaacatgatattacgcagccaatttttgtagacagtgagcataaattaacggatgcatttgaaaatcaatatgtaccggcatattatgtatttgacaaaacaggtcaactacgccacttccaagctggtggaagcggtatgaaaatgcttgaaaagcgcgtgaatcgtgtattaggcgagaacgaataaatacaggcagttgtaacaggtgaaaagcattcgatgcttagtagaacttgcatcgaatgtttttcttttttgtgtgtaggaagtaactgataaaggaaatataaaaatgtggattttttcttgtgagtttacaccatactaacactaacaacatgatacgaaacttactattggaggtaatttacatatgaaattaggtatgattggcttagggaaaatgggagcaaacttagtattgaatttactagatcataaccattctgtggtagcattcgatgtaaacaacgaagccgtacagaaagtagcagaaaagggagcagaaggtgcttcttccattaaagaattagtgagcaaattagaaaaaccacgcattgcttgggtaatggttccagctggggagctcacagaaaaagtaatttctgagctccaagaactatttgaagaaggagatatgattattgaaggcggtaattccaagtataaagattctgtacgacgtgctgcagcttctgctgaaaaaggaattcactactttgatgttggaacaagcggcggaatggaaggtgcccgaaacggcgcttgtatgatgattgggggagataaagaagcatttgctacaatcgaacctattttccgcgacatcaacgtagaaaacggctatctctattcaggtgcagcaggaagcggccacttcttgaaaatggtccataacggaattgagtacggcatgatgcaagcaattgctgaaggttttgatgtgttagagaaaagtgaatttgactatgactatgaagctgtagcccgcgtatggaataatggctctgttattcgctcatggttaatcgaattaatggaacgtgcattttcaaaagatgcaaaactggacagtattaaaggagttatgcattcttccggtgaaggaaaatggacggttgaatccgctctagatttacaagtgccaacgccagttattgctctatcgttaatgatgcgctatcgctcacttgaagacgatacgtttacaggtaaagtagttgccgctcttcgcaatgagttcggcggacacgcagtagaaaaacaataaaaaaacaggctggaacaaacgtattttagacgaattgaaaaacgaaccattgatcaacatgtttgattagtggttcgtttttttgttatggtggatagtttcgtctgtgtagatctttctagcagttcaactcatgtattccatttgttcgtctttagattgaattcatttagttatatccgagcctcttttttatgactatttacctttttttgaaaaattatctaaaaattatggtaatttatttcggaaaccgatatatttaaatatgtgtgccgcattttagctaaaggaaggacggggtatatggaaacgtttaaaaaactaaaagatttttatttgccgtaccgaatgtactttttttattctgctatttgcttgttgtttgtaacctccatcactgtgatttaccctattgtgctgcaatatacgattgatcatattgtgttaggaaaacaatatcagctagtcgataatgtagcatttatttttattgggctaatgattgtcaaaggaatctttacatatattcagcaatattacggcgacttatttggaattaagtccgtgtatactcttcgcaataaactttaccgcaaacttcagtatttaccgttttcttactatgacaatgctaaaacaggggacttgatgtccagattgacagctgatgtagaaggatttcgtttttttctatcttttggattctcagaattaattcgcttcgttattttacttactgccagctttttcgttatgttctattactctatttcactcactctcgtcacaatctgcctgctgccttttttgggggtagctgtttatcgctttgataaacgcgttcatccagcgtttcgcttaattcgccaagcgtttggggaacttaatacaaatgttcaagaaaatataagcggcatacaaacggtcaagtcattatcaagagaaaaatttcaaacatctaaatttaacgagtccaacggagtttataaaaatcgaaacattgaaaccgcgaatgtgtgggcaacttatttccccttaatggagtttataggaaacttatctattgttggtctccttgcgtacggaggagcgcttgttatgaacggaagcgtacgtccgggagagcttgttgctttctttagcttaacctcttatttaatgtggcctattatgaatctagggtttgttatcaatatgttttcacagtctaaagcttcaggtgaaaggctgctagaaattttagaagaagaagaaaaagtccatgagcatgccggaagtttctctattaatggaacggtcgagtttcaacatgttagcttatcctatccaaacgaagaaaaaaagtcgcttgagaacatatctttttctgcttctaaaggaaaagtagtaggtttaatcggagcaactggagccggcaaaacaagcttaacccagctgctcacgaggttttacgaaccgacttcaggacaaatcttagttaaccatcgtccgattaaagagtatccacttcctgttcttcgaaaagaaattggctttgtacttcaagaaacctttttgttctcaagcagtataggaaccaacatttcctatggcgtgccgggtatttctagagaagacattattgatgctgcaaaacgagcgcaggcgcatgaatttattatggagcttccggatgggtatgacacgatgctgggagagagaggactggggttatcaggcggacaaaagcagcgcattgcaattgcacgagcgcttatcttaaaccctagcatcttagtattagatgatgccacgagtgctgttgatatgaaaacagaaagagaaattcaattggctttaaaagaagtgatgaaaaatcgtactacgtttattatcgcacaccgcctttcttctttgcgacatgccgatgaaatcttagtcttgcatgaaggtcaaataaaagagagaggaagccataaaacgctcattcaaaaggaagggatttataaaaatatttatgacattcaatatgaaagcaatacgtcagtgatgaacgtataacaagggaggaatagaatggaagccggaaaaaataaagttgtgcgagagcgcttttattatcaaacagatcaaatcattgataagatgtttaactggaagcaaatggcccgcttgtttcgttatcttcatccatatcgaaaaaacttgcttcctttctcgtttcttatggtcattatcacaacggtcattagactcgctattcctattttgataggtgtatatacgcttgatcatgctgtaaaagataaaaatagcacgctgctcatgcagttagttttcataatctttagcttgtatgtactatcttatatttcgaatatctttcgaattaaatggatgaaccaactcgggcagcacgttatatatgatttaagaaaacatttatttacgcatattcaagggctgtcgcaccggttttttgatacgcgttcaggaggctctattcttgtaaggatcatgaatgatattaactctcttcaagatttatttaccaacggggtagttaacctgtttatggacctcttattgttagttgggattgtagttatattattttctctcagtcctgctttgacatgtgctgttttaatcattttaccgattatgtttttgatttccacaaagctgagaagaagaattcgtcggtcgtggcaagttgttcgtatgaagcagtcagtattaaattcacatttaaatgagagtattcaaggcattcgcgtcactcaatcatttgctcaagaacaagaaaatatgctgttttttgagcgcataaacagtgaaaattacgagagctggaggcaagctactcgaaaaaatgccatgtttcgaccgtttgtagaactcacaaatgctgtcggaacggctattttaatttggttcggtgctgtacttattcaagatgaacggctaacaattggtatttttgtatcatttgctttttatcttggaatgttttgggaaccgatttctcgtttagggcaagtgtataatcaattattaatgggaatggcttcatccgagcgtatttttgaatttctagatgaaaaacctctcgtcgcagatttggaaaccgctacgtctttagaggatatgaaaggaaaagttgagttcaagcacgtctcattttcctatgatgggaagcggaaagctttaaacaacgtatcaattgacataaaagaaggccagacggttgctttagtggggcatactggatctggaaaaacgtccattgctaatttaatcacacgtttttatgatgtaaacgaagggcagattttaattgataatatgcctattcaagatattacgctagcgagtttacgagcgcaaattagtattgtgctgcaagaaacctttattttttcaggaactattatggaaaacattcggtttggaaaaccggatgctactgatgaggaagtgattaaggccgcagaagcggtaggggctgcagattttataaagcgtctgaaaaaaggctatgatacggaagtagaagagcgaggaaacgtcttatccgtgggagagcgtcaattgatttcatttgctcgaacgctgttggctaatcctcgtattatcattttagatgaagcgacagcaagcatcgatacagaaacagaagtgaagattcaacaggcgcttaaaacgctgttaaaaaatagaacggccatcatgattgctcatcggttatctactatacgagaagcagataagatcattgtattagatcatggaagcattattgaaacggggaatcacggggaactaatgcagcaaaaaggcgtatattattaccttgttcaaacccatgctacagcttaaaaacagagggagctgatccttctgtttttctatgagtgtgagaaatagtaaagagatataagtgttaacgggaaaatgaggttgatacaaaagaattgtggtaaaataacggtagttcagattttttcctgtacataatggaggaattcaaatgaaaaaagaatttgcagtcatcggattaggtagatttggaggaagtatttgtaaaacattaagcgatcaaggaatggaagttctggcgattgatattgatgaagaaaaggtaaatgagtatgctaacgttgcttcccatgcagtagtaggcgattcaatggatgaaggggttctaaaaagtttaggaattcgtaattttgatcatgttatcgtagctattggtgacaatattcaggcaagtattttgacgacccttattttaaaagagctgggggttgagaaaataacggtaaaagcacaaaatgattatcatgccaaagtattatcaaaaattggtgctaattttatcgtgcatcccgaacgagatatgggccgaagaattgccaataacatgatttcaaacagcgtgctagattatttagagctatctgaagaacacagtattgtcgaattagtagcgagcaaaagaatggctggcaatacgctgattgagttagacattcgtgcaaaatatggcattaacattgtagccattaagcgtgatcgagatatcatcgtttctcctcaggcgtccgaaacgattcaagaaggggacgtgttgattgttattggagcagatgcagatatcaaccgcttcgaaaataaatttgccagtgcttaataaaagaaaaagagcagatgcaattgcatctgctctttttcttttattaaacctccataatgattggtaaaatcattggacggcgctttgttttttcgtaaaggaatggagccaatgtgtctgtgatttcatttttaatctcagaccattgtgacgtacgacgttccatcactttgttcaagtgttttgtaatgagggactgtgcatcattaattaagtcgccagattcgcgcatataaacaaaaccacgagagataatgtctggaccagcagcgatcttgaagtctttcatattgatgcttacaaccacaataacaagaccttcttcagataaaatgcggcgatcacgaagtacgatatttccaatgtcaccaattccgcttccgtcaatatatacagagcctgaagggattttgccggctactgaagcttcgctgtcgcttaaagctagcacctctccattatccataatgaagcagttttcttcaggaactccacagtctgttgcaagtttgatgtgcatcttctgcatgcgatactcaccgtgaattggcataaagtattttggtttcatcaaacgaagcattaatttttgctcttcctgtccgccgtgtccagaagtatggatatcgtttagagcaccgtgaataacctctgctcctgcacggaatagcatatcaattgttttgctaacacttactgtatttcctggaataggtgaagatgagaatacaaccgtatctccagggataatttgaatttggcggtgagtaccgtttgcaattctagatagcgctgccatcggttcaccttggctgcctgtacataaaatagtcacgcggttagctggaattcggttaatttgagaaggctcaatgaacgtatcttttggacatgaaatatatcccagctgttggccaatctcaatagctgcttccatactgcgtccgaatacagcaactttacggttatgcaatacggctgcttccactacttgctgtaagcggtgaatatttgaagcaaacgttgcaaaaataatacggccgtctactttacggaaaatgtcatgaatgctgtcacctacgcggcgctcagacatcgtaaagttaggaatttcactgtttgtactgtctgaaagcaagcatagaacgccttctttaccgatttcagccatttttgttaagttagccggttcgcccactggtgtaaaatcaaacttgaaatctcctgtatgtacgatttgtccgtttggtgtttttaccacaattccgtaagaatcaggaatactgtgagttgtgcggaagaaagttaccgatgttttacggaatttaattacgtcatcttcagtaatctcatgaagctgagctgtacgaagcaacccatgctcgtctaatttgttgcgaagaagtccaagggctaatttccctgcataaataggaatgtttaattctcttaataagtaaggaattccgccgatgtgatcttcatgaccatgtgtaacgaaaaggccacggattttatctgcattttttactaaataactgtagtcaggaataacgtagtcaattcctaaaagctcatcttcagggaatttaattcctgcatcaataagaataatttcatcttgaaactgtacggcatacgtgtttttaccgatttcgcctagtccacccagggcgaaaactgccgtttgattattttttacaaatttcattttcatcatatctccaatactttaaaatcttcatgctgttgttcatattctagatagtctccagtcactgcttgaacaaactcaatattaattgaacgcgcttttaacttttgacgaacgtcacgctcagaatctgcgttcacatacactgtttttgtattttcacgtacagctacttcactcattttttcttgaaaataaactttaaaaatcataacaaaaatctctccttaattccgaaattcaaataacttattttattatattataaaatgtgtatgtatttcatgtattttctaaagaaacttgctttcactacattttagtcatctaaatataacaagtcaattaattatagaataatattaataggaaacggatacaagactatattttccgggcgtataaaaataagggctattccattgtacgatgcagacacacactctgcaaattttacaacagaaagccctaaaaaaatcgattatgccatcgtttttttacgcaataattcattccagcgttttagcagcctttttcgaaaatcttttaacatgatttttcagctcctttgttttttgcaatacctgcctgtctctctctgtacttttattatatgatgaaaagggagaggtttctcgtggttaaatatggaaaaactacaaataggaccgtccatttatagagaaaccagcgcttgtttgatataattggaaaggcttaacaaagagataaaaaattataaaaaataaggtgataaacgtggaacgaaagattattttttttgatattgatggaacgttattggatcatgataaaaaactgcctgcttctacaaaaaaagctgtccagctgttaaaagagcaggggcatgaagtggcaattgcaactggaagggctccttttatgtttaaagatctgcgtgaagagttggatattcaaacatatattagctttaatggtcagtacattgttttaaatggagaagttctttacaaaaacccgttaaataaagaagaacttcaagatttaacagcttttgctgttgagcatgatcaccctgtcgtatacatggatcatgaagatatgaaatcaaacattgagtttcatgactatatcgaatccagcatcagcacgctgaaaattggatttaaccaccctcaccacgatcctacttatttcgaagggcgtgaaatttatcaatccctcttattctgtacaacgggagaagaagctccttatgaagaaaaatttaagaaatttgactttattcgctggcatgaattttcaactgatgttttgccaaaaggtggatcaaaagcgcgaggaattgagaccatgattgaaaagcttggctttgacaaaaaagatgtatatgcattcggagacggcttaaacgatatcgaaatgctagaatttgtcggaaatggagtagcgatgggaaatgcggaagaagtcgtgaaagaagttgctaatcttgttacaaaagatgtagcagaagatggtattctccacggattagagctagtaggattattaaagtaagaaaaacgcgagctctagctcgcgttttttagcgttcatatggaaaagcattttcaggttcttgaaatggattttctttattaatgtaatcataaaacataattccgtctaaatgatcaatttcgtgctgaaagacaacagcaggaagacctttcaaacgaattttcacttcttcgccttcaagcgttgtgccttttactgtgatacgtgcatatcgaggaacaaatcctgggatatcttgatcgacagacaagcagccttcaccgcctgtaaggtatgtcttttcaactgagtggctaatgatcttagggttaaataatgcatagctgtatagcttgcctttttcatccgtaacgtgtaccccaatcattcgttttgatacattaatttgaggagcggcaagcccgataccagatcgcagtccatatttagcagcaatttcaggatcttggctgttttttacatattctaataagctatgtaaaatctttttgtcttcttcagaagcaggtaacggtacttcttttgctacttctcgcagcgttgggtgtccgtcttgaataatatcgttcattgtaatcaactttcacatctccctaggctattttataggtataaagtgtaccaaatccgtataaaaaagtcattacctcgaccttgaccacataaatgtttctactaattatatgtatcaaacatatggaaaaacatgcataagaaaaaataaaagcgaccgttagccgcttttattgtataattaccagccgccacagctgcagccgataataactaataaaatgaacagtacgattaataacacaaaacctttattagaaccgccacagccatatccaccataacccaacataatgtaacctcccgtagttatcaatcccaaggtaaaaagtaataaactccctttttttcacgattgggttagtataatatattaaaaggtggaaaaagggtgtagataaattgctaattccctacaaaaattgtataatgacccatgaataagggaggatttaccagatatgaaatgcatcggaagatatatagttatcggcattgctgctatgtcactagcaggatgtgcagagggctcatcgcctgagcttgaggtatataatggattagaaaaagtggtagcacaagaaaagcaatttgctgatcagcaaaaaccgttagcagatttagaacagcaagaaaatgcgatatacgaccaaattattgagctagggattaaagataaaaagaaaataaaaaataaagcacaaaaagcgcagcagttattagatgagcgtgaaagtaaattacaaaaagaagaaaaaagcatcagcgcttcgcaaaaacaatttgaagcgacagagccgaagatccaaaaactagaggatggcaaagcaaaagaagaggcgcttgaactatcttcattaatgaagaagcgttataaggcgtaccagtccttacatgatgcctatcttcattccattgaattagatcgtcagctatataagctctttgaaaaagacaatgtgaaattagagaatcttgaaacacaaatcgcttcgatcaatgctacttataaagaagttgaaaagaaaaaagaagcgtttaacacattaacagctgactataacaaagccaaagaggatttttataacaaaacgaagttaaaggtgaaaaatagcgaggataaataagaaggcctgtgaagtttacaggtcttttttttggctgaaaaggaaggttttctgaaataaagaaagagtttcgacatgattcacgtaaaaattacaaaaggttattgttttaaaaaatcgtttatttgtggcaagataggagatgtgcagacgtaaaaaaagaaaaggttattataaaacatataatacagtttgcatctgtgtaatagtacagcatgtcttttttatgtgttttatttcacaaactaaaaaagcgtaatttcttgatgtaaatgcattgacgaactgttttagtgtattgtaaactaggtagcgtagtaagtgttgtattaatcatttttgcaaaataattaatacagtttaacgaaacgttcgtttcgcttaaactttccttttacgtaaatgtttgcacagaattcgctggggaatacatagaaatgttaaggattagcgaattcaaaaagctactcgacaaaatatgacttttacttgtccatttgggacattctaaaagcgtgtatgtttgtttgattagtaaaatgaatttatacggcttaaatgaaaggaagaggtgacttagatggctgctaaaactaaaaaggctattattgatgtatcaaagcaacttgataaaatcgctgagcagtaccaaacgttccaaattcttaatgaagagggcgaagtagtaaataaatcagcgttgccagatttatctgacgaaaaattaaaagagttaatgactcgcatggtatacactcgtattcttgatcaacgttcaatttcattgaaccgtcaaggtcgtttaggtttctatgcaccaactgctgggcaagaagcttctcaaatcgcttcacatttcgcattagaaaaagaagacttcattttacctgggtaccgtgatgtgcctcagttaatttggcatggtcttccactatatcaagcgttcttattctctcgtggtcatttccacggtaaccaagcgccagaaggtgtagatatactttctccacaaatcatcatcggtgcacaaatcgtgcaaactgctggtgtggcactaggtcttaaaaagcgcggtaaaaaagcagtagcgatcacttatacaggtgacggcggagcttcacaaggtgacttctacgaaggtatgaacttcgcaggtgcattcaaagctccagcaatctttgttgtacaaaacaaccgctttgcaatttcaacaccagttgaaaagcaatctgcagcacgtacaatcgctcaaaaagcagcggctgttggtatcccaggcgttcaagtagacggtatggatgcactagcagtatacgttgcagtaagcgaagctcgtgagcgtgcagtaaacggtgaaggtccaactttaattgaaacattaacttaccgttatggtccacatacaatggctggtgacgatccaactcgttatcgtacagctgagcttgacactgagtgggaaaagaaagatccacttgttcgcttccgtaaattcttagaagctaaaggcatctggaatgaagaagaagaaaacaaagtaatcgagcaagctaaagaagatatcaaacaagctattaagaaggctgacgattatccaaaacaaaaagttacagatttaatggaaatcatgtacgaaactatgccttcaaacttacaagagcaatatgaaatctacaaagagaaggagtcgaagtaagccatggcgcaaatgacaatgattcaagcgattactgatgcgttacgcacagaaatgaaaaacgacgaaaacgtattagtttttggtgaagacgttggcgtaaacggtggagtattccgtgcgactgaaggtcttcaacaagaattcggcgaagatcgcgtattcgatacgccattagctgaatctggtatcggtggtcttgctgtaggtctatcgactcaaggtttccgtccggttcctgaaattcaattctttggtttcgtatacgaagtacttgattctgtatcaggtcaagctgcacgtatgcgctaccgttctggcggtcgctggaatgcaccaattacattccgttcaccattcggtggaggcgttcatacaccagaacttcacgctgatagcttagaaggtatcgtagcatctcaacctggtttaaaagttgtaattccttcaactccatacgatgcaaaaggtcttttaatttcatcaattcgtgataacgatccggttgtatacttagagcacatgaagctttaccgttcattccgtcaagaagtacctgaagaatcatacacaattgatttaggtacagctgatgtgaaacgtgaaggtacagacgtaacgcttatcgcttacggtgcaatggtacactcatcattaaaagcagctgaagaactagaaaaagaaggtatctctgctgaagtagtggacttacgtacagttcaacctttagatatcgatacaattcttgcatcagttgaaaaaactggtcgcgtagtagtagttcaagaagctcaaaaacaagctggtatcgcagctaacgttgtagctgaaattaacgatcgtgcaatcttaagcttagaagcaccagtattacgtgtaacagcaccggatactgtgttcccattctctcaagctgagggcgtatggttaccagaccacaaagatatcgttgaaacagctaagaaagtacttgaattttaattagcattttactgtgatagaaatcagctttgtgctgatttctgtcttagataaaataaacactaacaaattgaacgcaactaactaggagggtgaagacacgtggcatttgaatttaaactgccggatatcggtgaaggtatccacgaaggtgaaattgtaaaatggttcgtaaaagctggagatgaaattgatgaggatgatgtactagcagaagtacaaaatgacaaagctgttgttgaaatcccatctcctgtaaaaggtaaagtattagaagtaaaagttgacgaaggtacagtagctactgtaggacaagttatcgttacttttgatgctcctggatacgaagacttaaaattcaaaggtgacgatcatgatgatgcaccagcagaagaagctaaagaagaagcttcaactgaagaagtgactgaagaagcaacagctcctgcagcacaagctgatgttgatcctaaccgtaaagtaattgctatgccttcagtgcgcaaatatgctcgtgaaaaaggtgtagacattaaagctgttcctggttcaggtaaaaacggacgtattgttaaagatgacatcgatggcttcctatctggtggttctacagctacagcaactgctgaagctccagctaaagaggaaactgcttcagctgaaccaaaagcagcagcagcacaagctattcctgaaggcgacctaccagaaactcgcgagaaaatgagcggtatccgtcgtgcaatcgcaaaagctatggttaactctaaacacactgctccacacgtaacattaatggatgaaatcgatgtaacagctcttgttgctcatcgtaaaaaattcaaaacagttgcagcagatcaaggtattaaattaacattcttaccttacgtggtaaaagcgttaacttcagcacttaagaagttcccagctcttaacacttcaatcgatgactctactgatgaagtaattcaaaaacattactacaacatcggtatcgctgctgacactgaaaaaggtcttttagtaccagttgtgaaaaatgctgatcgtaaatctgtgttcgaaatttctgatcaaattaacgaccttgctggaaaagcacgtgatggtaaattagctcctgctgaaatgaaaggcgcttcttgtacaatcacaaatatcggttctgctggtggacaatggtttactcctgttatcaaccacccagaagttgcaattctaggtatcggacgtatcgctgaaaaaccagttgtacgcgacggtgaaattgtaattgctccagtattagcattatcactaagctttgaccaccgtattatcgatggcgcaacagctcaaaacgctcttaaccaaatcaagcgtttattaaatgatccagaattattattaatggaggcgtaataaatggtagtaggagatttcccaatcgaaactgatactcttgtcattggtgctggccctggtggctacgttgcagcaattcgtgcagctcaattaggtcaaaaagttacaatcgtagaaaaaggtaaccttggaggcgtatgcttaaacgttggttgtattccttcaaaagcattaatcgctgcaggtcaccgttttgaacacgctaaacattctgaagacatggggattatcgctgagaacgtaacagttgatttctctaaagttcaagaattcaaaaacggcgttgtaaacaaacttactggcggtgttgaaggccttcttaaaggtaacaaagttgacatcgtaaaaggtgaagcttacttcgttgacagcgaaactgtacgtgtaatggatgaaaattctgcacaaacgtacaaattcaaaaatgctatccttgcaactggttctcgtccaatcgagatccctggattcaaattctctgagcgcgtaatcaactctacaggtgcattagcgcttaaagaagttcctaaaaaattagttgtaatcggtggaggttacatcggtactgagcttggtactgcttttgctaacttcggtacagaagttacatttgtagaagctgctgatgaaatcttagctggttttgaaaaacaaatgagttcacttgttaaacgtaaccttaagaaaaaaggaaacgttgaaatttatacaaaagcaatggctaaaggtgttgaagaaactgctgacggcgtacaagttacgtttgaagtaggcggagagtcaaaagtaatcgatgctgactacgtattagttactgtaggtcgtcgtcctaacactgatgagcttggtcttgagcaagttggcgttaaaatgactgaccgtggtcttatcgaaatcgataaccaaactcgtacatctgtaagcaacatctttgcaattggtgatatcgtaactggacctccacttgcacacaaagcttcttacgaaggtaaaatcgcagctgaagtaattgctggcgaacctgctgaaattgactacttaggaattccagcagttgtattctctgagcctgagcttgcatctgtaggttatactgaagcacaagcgaaagaagaaggattagctgttaaagcttctaaattcccatttgctgctaacggacgtgcacttgcacttaacgctgcagaaggcttcttgaagcttatcactcgtaaagaagacggagtagtggttggtgctcaaatcgctggacctagcgcatctgacatgatcgctgagcttggtcttgctatcgaagctggcgtaacggctgaagatatcgcattaacaattcacgctcacccaacattaggtgaaatcacaatggaagctgctgaagtagctattggaagcccaattcacattgtaaaataaataatggtttaaaaagctgatgcgtacgcatcagctttttttttgaagaaaacggttttcacaaagcaccaggtgcttgtcagacagtttttgttgctgatgagcactcctttttagaagaaacgtgtaaaaacgctgaggcagtcttaaatgagctctagatgcatacatatgaagtgggacgtgctttcttataggtagataaaaaactgctcttttggataacgaatgaaaaggcggcgtaggagctatgaagacgtatttcgtttggagcttacacattgttatttggatgggttattcactggttgaattgctatcaaaacgtgatcagttgacatctaaaattattttatttttagtatttgcttatttagcttacggcatagcagaaatgaacgtcaaatctaaaagactggcgcttatgatgactggtacaacttcagctgtctgcttgacatgttatcaactaattttattttgcacagcgtaagattgcataaaaaaagcgttagcttatataagctaacgctttttttgtcttacacagatttcttttctcttttcaatgcgccttcttctttaaatgctttcattaatgagaagaccgttagcactagcacaattgagaatggaagtgctgctataatcgcagctgtttggagcgcgtccaaaccacctgtccaaagcagaatgattgctgttaacgattgaattaagccccacgtaagtttaatagagcctgaaggatttagatcaccatttgttgtctgcattcctaaaacaaatgtagctgagtcagctgatgtaataaagaatgtagcaattaagcaaatagcgacaatggacatgaacgtaccaaatggaaactgttcaagtacatagaataaagcaacttctgttcctttattattaataacatccataacaggaaggtctttaaaaaagtctaaatagaccccagaacctccgaatacggcaaaccataaaccaccaaatacggtcggaacagctagtacaccaattaaaaattctcgaatggttctgcctcgtgaaatacgagcaatgaacgtaccaacaaacggtgcccaagcaatccaccatgcccagtagaaaattgtccaatcttgaacccaggtgctgttatcaaacgggctcaatcgaaaactcattgacggcaagttttgaatgtagctgccaatggttgtaacgaataagtccataataaagttggttggacctgcaaataacaagaacagcattagcagaatagctaaaacaatattaatgttactcaaatacttaatacctttgttcagccccgtctgtgctgacagcatgaacaagaacgtcacgataataataacaattaattgagtcgtgaaattgttatcaatacttggcgacaagtaagaggctccaccggtaatttgaatagcgccaagtcctagagatgttgctaccccaaagacagttgcaaatacggcgatgacgtttatgatcgttccaagaggcccatcaacacgttttcctagtagaggacgtaaaatattgctgatgatgaacgggtaaccttttctaaattgaaaatatgcaagggccagtgcaagaacggaataaatagcccaaggatgtaaaccccagtggaaaaacgaatagcgtagagctgcacgagctgattctgctgtaccgccttcaccagaaggtggagtatgaaaatgattgattggttctgagacaccccagaatacaagaccaatgcccataccagcactaaataacatggcaaaccatgagacataaccatactgaggtttttcgtcaggcttccctagtttgatgtttccgtacttcgaaaaaattaagtacagtgtaaaaactaagaataatgtagctgctagtaagtaataccagccaaatttctcgatgataaaactatgtattgccgatgtaacaggtgtgagcgctgcgcttcctagcgtagattccggaataacaccccatacgataaatactgcagcaataataaccgaaatgataaaaacgggagtcagttttttcatcgattaacactcctttcctattctattttacataacatagtgtttcatatagccttttcaggtatatatgaaaccacatggttatacattttagtgaagtttgtatgaaatgtctaccccattagtaagaaaaagcggaaagagaacaaatttttatttttcgtaattattttaaagtgatgaaatagatttgaaattagacattgttttttcatataaatagatatgattctaagcgttcagctttttgaaaacaaatataacatttatgagaaaaatatttttaatgtgacatactaattagttgttgacatatttaatgtgacataataatataatatcaagagttgtaaaacgcttacaaaaaaagacggttaaaggggagtttacaaaatgggaacaatcgtatgtcaaacatgtaactgcacaattgatcatttcgaagatgagaaagtgacgcgattatactcaacatgtaaaagcggagaatgtcaaaaagcagatgaagatttagattaatcaataaaaaaaggtgcggatttccgcaccttttttattgaattgctttatgttctttaatgacacgaaatgtttttaattcaaaatcttccggaccctgcactggtaaacctgcctctaagtttgtttcaatataggttaaattttcctcagtgatgatttccccaggaataaaaataggaataccaggaggatagaccatcacaaattccgcaataatacgacctgccgactcatgaaaaggtaccacttcggtttcagcgtaaaaagcatcgcgaggtgttaaagccaatacaggaatatcaggcaataaaatagccggttttgccgttgtctcagaaagattatggaattttgcagataactcacgcagagccgtgaccagacgtaatagatcttcttctgtatctccaggcgtgataatacatagaatattataaaggtcagacatttcaacttcgatattatgagcttcacgcatccatttttctacgtcatagcccgtaattcctaaatctgaaacagaaataattaatttagtagggtctaaatcatacgtagcttttgtccctaaaatttctctgcctatacatcggatatgctcaatggtattaatttcttttcgtgctttttcagcaagagaaattgcacgttcagccagctcttttccttctgtagctaaacgttttcgtgcaacatctaaagaagccagcagcagataagatgttgatgttgttgtcagcatgcttaaaatagactgtacacgttttggagaaattaagccttcgcgtatatttagaattgaactttgcgtcatagagccgcctaatttatgcacgcttgttgctgccatatctgcaccggcctgcatagcagacaaaggcaaatcatcatggaagtgaatatgaacgccgtgagcttcatcaacaagtacaggcacttgatacgagtgggcaatttctacgattttacgaaggtctccggaaattccaaaataagttggattgataacaagtactgcttttgcttcagggtgctgctttaaggctttttctacagagtccgatgtaataccgtgagaaatgccaagattttcgtcaatttcagggtgaataaaaataggcgtagctcctgaaaaaacaatcgcactcataacagatttatgcacgtttctaggaacgataattttatctccaggcccacatgtcgccatgaccattgccataattgctccgctcgttccttgaacagagaaaaaagtatggtcagcaccgaatgcttctgcagctaaatcctgcgcttgtttgataatgccttttggctggtgaaggtcatcaagaggaccgatattaattaaatcaatggataaagcatcatcgccaataaatgagcggaattcaggatccattccatttccttttttatgtccagggatatggaattgtgttgggtttttcttagcgtgattaactaatccagtaaataatggagttgaaaattgagaagacaactttgctatacacctcttttatcataaattgtcagtccctctaagcaaagcttagagggactttgattgtttttttatcaaattacagcattcaattttatataccaaaaactagtggctgttgaattctacatattaaaatatcacatcttttttctataaaagaaattcaacagaaattctattcggcagttttcttgattttaaccattatataaatgaatgaaacgtgtatgtttactactgtttgataatataaatacaatttttagttaaaaaaatacaagtaattgtaaactgcctattactcattattttatagttctttatgttttgaaaatccccataaaacaaaagaattatagcacttattaacccatttgcaaagatattttaaagagaaaataaaaagaaaaaaaaggagaaattcttttgtgtgaaaagagaataaactttgtgtacattatagattgtgatagagttaagaatatagatatacatagattgaagaaataaatggagtgatgagaagtggaatatcaataccctatctcccttgattggagtacagaagaaattattgatgtagtgaagttttttgaaagcattgaacgagcttatgaaaaaggtattgagcgtgatcacctaatggcagtctatcgccgatttaaagaaattgtgccaagtaaagcagaagaaaaaacaatctgtaacgattttgaagatcaaagcaaatactcttcttatcgaacgattcaaaaagcaaaggctgcttcttctggagatattataaaaatgtaaaaaatgaggctgggacaaaagtagtttagccgaagtaaaaaacgaatcattaatcaaattgtttgattaatgattcgttttttttgttacggtgaacatagagtttatctgtttcgtttcttcgagcagttgattggagggcaaggcgaagactcctgcagggaaatcaactgcggtgtcacaagcgtttcagcttatgtatcccatttattggtctttcgatgagcttcctttcgttatgtctcaccctcatttttttatatcaattcgttaaaattatgcatatgcttttttagttagttcatataatggagttaccgtatgaaatgtttgttcaatacgagccatccattcttcgccgttcattgcaatcgcttcttcttttggaattgtaatgccgcataggatctcagcttttttaaccgtctctagacgttcaaacaaactctctaagtcttcagaagataagtcgcccattttgtcactatcaggttttgtatgatctttcgaccaaacaaacgaggctgggatattttgacgaatctcctcaatgttttgttttagcagctttccaaattgttctttaataggtgattcgtaaattacggcgaaccacacaaagacatgtgtttcccaaaggccaatttgaaaatgagggagctttttatacccgcgtttactgttagcaaaggctacccacgtatctactggcgggttaactgttcttcgtgcatgtttggcaatgtgtacgaacatttcatctccacaaagtgaagaaagagtaggagcaaaatgattgctcaattgttcgaattttgggcgtatcgttgtcttgatggcttccatacgtgcatcaagtccctcgatacggaatacgttaaagtcatcttgtgaaaatcctgagaatgccatgtgaaacctccgttttttagtgaatatgtatagctgctgtgcatctatgcaagtaagtatgatttacgcgaagattctaccacatgaaaagcataaacaccaattaattcgcatatgcttgtcaaaacgtgtctatcatttttttataggtaatcacacaatttagttacatgagattaggtttcgacatagactatatcaatcaaaatatctgaaaatttagttttctataagcgggttcaataatttgagaggggtgtttgaaacatgaaacaagtggtgaatatgtataagaagaatgatggacaaaaaagattaggtgtaattcgtttggagttagattacgagttagcgacgttatatgaagccatgatggagaataatgaggaacaaaaacaaaaatgtaagcgaaagctcgagaaacttcgtgaagaaatgatatctcttcagtagcagatacgggaataaaatagaacaaataagggtaaactgtaaaaaaggattaaactgaatgagcagattcataagtggtaacagagcacgtgggagaagaagcggcagttcttctcccacgtgctctgttaattgacatcttgcagaggtttttttaagcttaaataagagacgtatttttgagggggaattgagatgacgcaacgctggaaagaaatcgatacatacgttaaggagtggctaaaagaagctggacaaaaaattcaacagtcgtttagtaaagaacttctcattcaaacgaaatcgaatccaaatgatttagtaacaaatatggataaagaaatcgaacagttttttatctcaaaaatcaatgaaacctttccggaacatcatattcttggagaagaaggatatggagaagagcttgaatcagaagaaggaacgatttggattatcgatccaatcgacgggacgatgaactttgttcatcagcagcggaattttgctatttctatcggtatatttgaaaatggtgtaggacaagcaggttatatttatgatgttattcataatgagctgtatcatgctttaaaaggacagggcgcgtttatgaatgacatccaattgccgaaacttgaacctgtaccagttgaacaagctattattagcctaaatgcaacatgggtaacggagaaccgccgtattgatccttccgtattaagtccgcttgtgcgcaaagtaagagggacccgttcatatggatccgcagctattgagcttgcttacgtagcggctggacgcttggatggatacattactctacgtttggctccatgggactttgctgccggtaaagtattgattgaagaagttggaggagttatgacggatttagaaggaaagccgttagaaattcttgaaaaaagcagtgtatttgtaagcaaaccaacattacatgacgaaatctttcgtacgtaccttgaaggaaagtggaataaataaaatagaagtgaagacttacgtgtagtcaaagaattttgtgatgaaaaaacgtcatgaaccattttgatgttgcaaatggccatgacgctttcaatcatcgcaaaaaaattacagctgccctttttctcgcatttttttcttagtcgtaaagccaaggcccattacaacaattaaagctgcgatagctaaaatgaccccgagagcgcttccttctccgataaatatgccgattgacataattgccgcagttgcgataaatgcatataaaacaaatacccacttaatgtttctcatgttgattcctcccatttataaaggatatttatagtgtacaacaaaatcattctgcaattctagagttagtgtgatataatagcttagttattacaagcataggagtgaaatgcgtgaacattcgtaaagatttacgtaatattgccattattgcccatgtagaccatgggaaaacaacgttagtagataaattattacatcagtccggaacattccgtactaatgagcatgttgaagaacgtgcgatggattcaaatgaccttgagcgtgagcgtggaattacaattttagcgaaaaacacagctattaattataaagatacgcgtatcaacattatggatacgccgggacatgctgacttcggtggagaagttgagcgtattatgaaaatggtagacggtgttctacttgtagtagacgcatatgaaggatgtatgcctcaaactcgctttgtattgaaaaaagcattagagcaaaacttaacgccgattgttgttgttaacaaaattgaccgtgactttgctcgtccaactgaagtagtggatgaagtaattgacttatttattgaactaggtgcaagcgaggaacaaattgagttccctgttgtttatgcttcagcaatcaacggaacagctagcacgaaccctgaaaagcaagatgagaacatgtcatctctatttgactcaatcattgagcacattccagcaccggtagacaacagcgacgaaccacttcaattccaagtggcaatgcttgactacaatgactatcttggtcgtatcggtgtaggtcgcgtattccgcggaacaatgaaagtaggccagcaagttgcattaatgaagcttgacggtacggtaaaacaattccgtgtaacaaaattattcggtttcctaggcttaaagcgtgttgaaatcgaagaagcaaaagcaggagacctgatcgctgtatcaggaatggaagacatcaacgtaggtgaaaccgtatgtccgtttgaccaccaagatgcactgccaattttacgtattgatgaacctactttacaaatgacgttcttagtaaacaattcaccgtttgctggtcgtgaaggtaaatttgttacatctcgtaaaattgaagagcgcttaatgtctgaacttgagacggatgtaagtttacgcgtggaaaatactgattcaccggatgtatgggttgtttcaggacgtggagaacttcatttatctatcttaattgaaaatatgcgtcgtgaaggatatgagattcaagtatcaaaacctgaagtaatcgttcgtgaaattgatggcgtgcgctgtgagccagttgaacgtgtgcaaatcgacgtgcctgaagaacatacgggttctattatggaatcgatgggtgctcgtaaaggtgaaatggttgatatgattaacaacggcagcggtcaagtgcgtctgatctttatggttcctgcacgtggtttaatcggttatacaactgagttcttatcgttaactcgtggattcggtatcattaaccattcatttgatagctaccagccaatgcagcaaggtcaagttggaggtcgccgtcaaggtgtgcttgtttctatggaaagcggtaaatcatctacttatggaatccaaggcgtagaagaccgcggtacaattttcgttgagccaggtacagaagtatacgaaggtatgatcgtaggagaacacactcgtgaaaatgatatcgttgttaacatctgtaaaatgaagcaaatgacgaatatgcgttctgctaataaagatcaaacaacaggtatgaaaaaacctcgtattatgtctttagagcaatcacttgaatatttaaacgaagatgaatattgtgaaatcacaccagaatctattcgtttacgtaaaaaaattcttgataaaaatgaacgtgaaaaagcagcgaaaaagaaaaaatacgctgacacgaaataataaaaaaagtaagtcgttagctctatctgctagcggcttgttttttatctattatatcagaattttctattttttgaaagcgttttataaagaaggggtttggaaaggaaaaaggtggcttatatcgaataatataaagtaaggaatagggggaagaagtatggatgtaaaagaacacctttcattttttgccgctctgtatcaagtagatgaacatgcaaaaataggaatgtggctgttatactttaccattttagggctatctgttctcgtgtacaaactcgggtttgcaaagaaactgccgcttttaaaatctgtggttatttatctatttttagcttttggatgtacgattttaacgtttttaggcatttttttacctgtagctgaagggcttgtggttgcagcacttgtattaattatttataaaatacggctgtatcaggctaaaaagcaaaactcctcgttgggttcataaacgactacataaaaagacgcttgtagctacaagcgtctttttagtatgatatagccgaagacaagagcggctgtgaaaactaaatggccagctgtccaataaaaaatcgctactgcatcatccaccgcaggcgtaggcttgagcgcaagcagcgtcaacggaaaatacaaaggaatggttggaagtgttaataaaaaggaacacaatacgatttttcgaatagacatattaattaatttacctactatgtaaacaaaaacgatcccaattgcagcggcaatgagcaaatgaaaaacaaactctacccattcaggccattgaatagggccaatgataggaataaaatcaacatttaataaaagggtataaacttgtttgccggttagccattctatccattttaaacataacccaaggataatcccgcttaacatgccaatccttattcctaatcggagcaccttaccaatcctcctctgtctttttcgactcatatagtttaaagttgccagtagctatgcgttcttttgttcgtttttcaatccgttcagaacattcattgcacatatatgtatggataggacggttgcgcagtcgttttgctacgagcgtttcatcctcaattgtttcaattttatcgcacatgacacattgtactctcatttctatcacctcaacttctctatacatcattctagccgaaaattcttgttttataaagtttttttgcggtgctgtctctcagtagaaaaggaacgataggaaaacattcctaaagaagcaggtaattttgcttgttagctcgaagatagtaactagtaagtacataaacagtaggagggatgaaaatggccaacgaagtcgagactcaactagtagatgcattatacgatgagctacagacagagagatttgcaaccatttcaactattgattttgaaacaaacggtccaaatgttagtgccatttcgtggttagtagctccgactaaacaaaaaattcgatttgccgtagatgtcaaatcgaggattgtagaaaacattaaacatacgaataaagcagtggtaaatattcttgctaatgaatcatgctactcaatcagcggaatagctgaggtagtgcaagaaaagttagaaggagtagctttaaagctgacgctaatcgaactagatattaatgaagtaagagatgttatgttctatggttctaagatttcagtaaacccttcatatgaaaagacctatgatccagtagcagctgctaaactcgataagcaagtaattgaagcgataaaaaaagcttagcagcagcctgccgctaagcgactttcttattcatttttttgaagatgattattagattgtttttcctgctcattctttaaattttgctcttgtttattatttaatttttgattgtttgtatctgttgagctaggatttcggcgaatttcttctgcaaattcaggcatcactcggtttacaatggctgctaattcatctaaaaatcctgtaaccggccgacctttgcgaatttcatttccaatttgttttagccgagcgaccgtatcaggatctgcaataacaacagaattagcgccgtacggatcagctttcagaccttcggcaactgtatatttgattgaacttacttctgaacgatcaatgtctttgccgacgtcaatgcctacgattgcatacttaccgagcacaatggcagtagcatcatttacattcggaacgcttgaagccagttcaactaaatgagctgatatttcattagcagtacgcttgtgagagcgctcaggagatgaatttttgacctgtacaattcgatctgttttttgcccttcttcaatgtctgcttggttattgttacagccggttagtgtaataaaacataagctaatggatagaaaaaatttgttcatgtgggagactcctccttatgaatgactcattttttgtagtaatttgtatttagtttctaatagttcttctatctttatacacgtgttcatatatttaaagaaaatggtccgtccatttaaggtcacttcacacatgtgcgttacatagtatataaatggatgggtgccttgtttcactccttacaggaaaaacaatcggagtaggaggctgaattattgggaaaaatttatgtattagatacgaatgttttattacaagatccgcattcaattttttcatttgatgataatgaagtagtgattccagccgttgtgctagaagaagttgattcgaaaaaaagaaatatggatgaagtcggacgaaatgcaaggcaggtatccaaactcattgataacttgagacaacatggaaagttatatgagaaaatccctttagaaaatgggggccatttgcgaattgaactcaatcatcgctcttttcaacagcttcaagaaatctttgtggaaaaaacaaatgataatcgaattttagctgttgctaaaaatctatctcttgaagaggaaacaaaagaagatggacgtgaagtgatactagtgagtaaagatgtgttggtacgtgtgaaggctgacgcaatcggcttaagagcagaagattttttaagtgatcgagtagtggaattcaatagtatttatacaggcttttcggaagtctatattgcaaaagaactgctgagtcaattttacgaaaaaggagaactgctaacgtctcaaattgcgaaccactccttttttgcaaatcaattcttagtgatgaaagatgcatttgggggatccggatcagccatcggcattgtcgatcaaacaacaacgaaagtaaaaaagcttttatttgaatatgatcatatctggggaatcaaacctcgaaatgttcagcaaatcatggctttagaacttcttcttagagacgacgttcaactggtcacgttaattggaaaggcaggtacgggtaaaacgctgcttgctttagcttcaggacttatgcagacggaagatctaggatgttttaaaaagctacttgtagctcgtccaattgttcctttaggaaaagatattggattcttgccaggagaaaagcaggagaaacttcgtccatggatgcaaccaatttatgataacctagagtacttatttaacactaaaaaacctggagaattggatgccattctagcagggctcagttcaatagaagtggaagccttgacgtatataagaggccgaagcattccggaacagttcattattattgatgaagcgcaaaatttaacgaagcatgaaattaaaacaattttaacaagggtaggggaaaagagtaaaattgtccttatgggagatccggctcaaattgatcatccttatttagatgagtataacaacggattaacgtacgtagttgaaaagtttaaagagcaaaaagtatcgggccacgttcggttaatcaaaggagagcgctccgggctagcacaattagcagctgatattctttaaaagaagcggggttccttttggaaccccgcttcttttattatgtaacgatgatttcttccacatatttaatagggttatttcggttagatccgtcaggtaaatagacatagataggcccatcttctctaagaggctttccatcttggctgaaaccaaagattagtttttgtgcttcttctaatgaaaaagaaatcagtgcgtcttttgttttaaatgaaacgttggtagcttcttcagtaggtgaagcgttagctagaaaaggtgcaaataaaatgccgaatgttccatttactagctcctgttttttgaatttcttttcggtttttaacgtaggaggaaagacggctccctcttgaatttcacggtcccaatgcttcgaaacagcctttgtgtacgcttctgtctcgtctttttgctccggtggatgttcaaagaaaacctccatatcgagcttgcggtcatcgaaaatccacacgcttgggtcgagtgtcagtgtatattttacttttccttttaacataataattgaattcatcataaatgcccccttgctaaaagtataagcgctttctacttatttgtcactttgatgaaaaaatttagttgagagtgattctcgtatgatataatgtaaaggtcaacgaaagtgcgaaatttcctacatctatggtaacggttttgagaaagtaacagtataaaaaagacggccagcctcacggacatgtttatccttgcttttttggagcatagcctttaaaattgagagatagattaggtaatcgctcgcgaacggagggattgagtttgacgcctgagacaatgatagatcatcgtgaaaaagcgtatgcgttgttaaaagctgatgcagataagattttgcaattaattcaagttcaaatggataacttaacaatgccacaatgtcctctttatgaagaggttttagatacacaaatgtttggtttatcaagagaaattgattttgcagttcgtcttggtttaattgatgaacgtgttggaaaaacattgctagaccgcctcgagcgtgaactttctgcactgcatgaagcgtttacaaaaaaataaaaatcacgcgatcgaaactcaaactatatacaaacgtagtttgagttttttattacaggtggttgaaatttcctaatttactcaaatttgtacataaaagatgaaacgaaacagaaacacgtcatttttaaaggaagagggttatggtaaaaaaaatatttaggcattttgactattcaattgtaattccagtgctgcttctttgtgcggttggactagttatggtttacagttcaagtatgattgtaagtattacaagatatcatacatcaagcgatttcttttacaacagacaaaaaatgtggcttgcttttacgcttgtattgttcattttaacaatgctaacaccttacaagctgtatcctaaaatactgccttatgcgattctagggatttttgtactgcttttgcttgtgtttgtaatggggcatacgagtaacaatgcgcaaagttggctgcagcttggcggggcaaacatgcagccggctgagtatgccaagcttgttgtcattttatacttatcgtatgttttgtctaaaaggcaagagtatattgacaacatcaaaaaagctttttttggacctatgggtcttgtatttctaatattaggctttgtagctattcagcctgaccttggaacgggatcaattatttttgctattgccgttaccattatgctatgttcgggaatctctaaaaaaacctttttccgcatgctagcactaggtatcattttgcttacggtaattattacgattggtttttttacagggcagtttactcccaatcgaattggccgttttaccggtgcatcagatccatttacgaatgctcaaggaaccggttatcagctggttaattcatatttagcaataggtacaggaggcttaaaaggccttggtttaggagaaagtgtacaaaagtatggttatcttccggagccccataccgatttcattatggctattattgcagaagaattagggttctttggagttatgcttgtgctgggtcttttaggcttcttaattttcaggattttaatgctggctaaaaaatctcaggatccgtttgccagcatgatttgtattggagtagccagtatgataggtattcaaacaggcattaaccttggagggcttacgggactcattccgattaccggggtcacgcttccgtttatcagttacggagggtcttcgctgctaacgctgatggtatctatgggaattattgtaaatatttcgtttttcgtaaactatcaaaataaaaaacagaaaaatacggaaaatattgtgctacatccgaacaatacatcaacaacaagcgattgattttcgtgaaaaaaatgtgtaaaaaaagcaaaaatttattggaattttatcattttccattgatttttgcttttcttttatccaattttgctatatattgaagtttatacgaaattgagaggagattagcaacatgagttttgtaactaaaaaaatcaaaaaagtattagtagcaaaccgaggagaaattgcgattcgtgtatttcgagcatgtactgaactgaatattcggactgttgcaatttattctaaggaagacgcaggttcttatcaccgttacaaagcggatgaagcctatttagtaggagcggagaaaaaaccgattgatgcttatttagatatagaaggcatcatcgacattgctaagtctcatgatgtagatgctattcaccctggctacggttttttgtcagaaaatatccaatttgcgaaacgttgcgaagaagaaggcattatttttattggtccaaaatccaagcatcttgatatgtttggggataaagtaaaagcacgtcatcaggctattcaagcagatattcccgttattcctggtaccgatggtcctattgattcaattgacgaagcaaaagaatttgctaatcagcatggatatcctctaatgatcaaagctgctttgggcggaggcggtcgaggcatgcgtatcgttcgcgatgcagacagcctgaacgaatcttatgaccgtgctaaatcagaagcaaaagctgcttttggtaatgatgaagtgtatgtcgagaaactagttgaaaatccaaaacatattgaagtgcaaattttaggtgatgaacaaggaaatgttgtgcatctttatgaacgcgactgttctgtgcagcgtcgtcaccaaaaagtagtagaagtagcaccaagtgtttctatagatgaagacttacgtctccgcatttgtgaagcagctgtgcagctgatggaaaaagtgcagtacataaatgctggtacagtagaatttttagtatcaggaaacgatttttattttattgaagtaaatccacgtgttcaagtagagcacacaattactgaaatgattacaggtattgatatcgttcaatcgcaaattttaattgcagacggctacgggcttcacagcaaggaagtatccattcctgcacaagatcaaattcacgtacatggatatgcgattcaatctcgtgtaacgacagaagatccgttaaacaattttatgccggatacgggtaagattatggcttatcgttctggtggcggttttggcgtacgtttagatacgggaaacagtttccaaggtgctgtaattacgccttattatgattcactgttagtaaaagtaacaacatgggcattaacattcgatcaagccgcatcaaaaatggtacgaaacttaaaagaatttcgtattcgtggaattaaaaccaatattccgttccttgaaaatgtagtgaagcatgataagttcttaacaggtgcttatgatacatcatttattgatacaacgcctgaactttttgttttcccgaagcgaaaagaccgcggaactaaaatgcttacatacattgggaatgttacggtaaacggattcccaggtgtatcggaaaagaaaaagccaatctttacaaaaccgcgcgttcctagtgtggatataagcaaaccaattcaaaacggaacaaagcagattttagatgaaaaaggcgctgaagggctagtaaattgggtgaaagaacgcaaggaagtgctattaacggatacaaccttccgtgatggccatcagtctcttttagcaacgcgtattcgtacaaacgacttaaaacaagtagctaacccaactgcacgcttgcttccagatttattttctatggaaatgtgggggggagcaacgtttgatgttgcttatcgattcttaaaagaagatccgtgggatcgcttgcttactttacgtcaacaagccccaaacgttcttttccaaatgcttcttcgcgcgtcaaatgcggttggatataaaaactatcctgataatgtaattaaagaatttgttgaaaaatcagcttatgcaggtattgatgttttccgtatctttgacagcttaaactgggtgcaaggaatgactcttgcaattgactccgttcgtcaaacaggaaagattgcagaagcagcaatgtgttatacaggtgatattttagatccgacgcgccgtaagtatgatttggattactacaagaacttagcaaaagagcttgagcagtctggagcacatatcctgggcattaaagatatggcgggtcttttaaaaccacaggcagcttatgatttagtatcggctctaaaagaaacggttgatattccaatccaccttcatacgcatgatacaagcggaaacggtgtatacacgtatgcaaaagcaattgaagcaggtgtagacattgtagacgtagccgtaagctcaatggcaggcttaacgtctcagccaagtgctaactctctttattacgccttagaaggtgcggaccgcagaccaaatctagatattaaaaatctagaagagctttcttactattgggaagacgtgcgaaaatattaccaagacttcgaaagcggcatgaacgctcctcatacagaagtatatgtgcatgaaatgccaggcggtcaatatagcaacttacagcaacaagcaaaagcagttggtttaggaaaccgctgggatgaagtaaaagatatgtattcacgcgtgaatttgttatttggtgatattgtaaaagttacgccatcatcaaaagtagttggagatatggcattgtttatggtccaaaacaacttgacagaagaaacgctgtttgagcgcggtgaaacgcttgacttcccggattcagttattgaattgtttgaagggtatttaggacagcctcacgggggattccctaaagagcttcagcgcatcattctaaaaggcagaaaacctattacagttcgtcctggagaactgttagaagatgtggacttcgatgcagtgaaagaaaagctgtttaaagacttaaatcgtcaagtaacgagttttgatgccattgcttatgcgttgtatccaaaagtatttatggattatcacaaagcagtcgaacaatacggggatatttctgttcttgataccccgactttcctatacggcatgcgtttaggagaagagattgaaattgagattgaaaaaggaaaaaccttaattgttcgccttgtatccattggagaaccgcaggcagacggtacgcgagcagtatactttgaattgaacggtcagcctcgtgaagtcgtgattaaagacgaaagtgttaaaacaaccgttacggcaaaacaaaaagccgatcaagcaaatccggcccacatcggtgcttcaatgcctggaaccgttattcgagtagtagtagaaaaaggcgataaagtctcaaaaggtgatcacttaatgatcacagaagcaatgaaaatggaaacaaccgtgcaagcaccatttgacggcgtgattaaacaagtacacgtgtcgagtggagatggcattcagccgggagatttattaattgaattagaaagctgatcaaaaaaggtacgagctctgagctcgtaccttttttgatcaattatgtgtatgacgcgttgcaagtaaggttaagtagcttaatacaccgaataggaaagagataattaaagaatgagcaagcgcgagctctagctgcaaacgtgtgacaacaacaagcataccggaaaccgcctgaaaagtaactagaatgagagcagctaaccatccgtaaaaaatatttttttgatggcgataatatttaactgcatggataaaggcggctaaaatccatacaaacgttaaaacagcagcgaatcgatgtcccatttgaatccactgattcaaatcaacaggcagccaaccgtttccgtttgaacaaaatggaacgtctggacaagctaagctagcttctttatggcgaacaagcgcgcccgtgtacacaacggcatatgtgtacaagataaccccgtaaatatgttttttcattttagagcctagctgcatattagttgcgtcgagcttttgatccacttcaaagataataagtgttaacagcagcacagaagcaaacgaaataagagaaataccaaaatgaagagcaagcactgcatctgattgcccccacataacggcagcggccccaattaatgcttgcagtactaggaagaaaaaagagataaacgctaaaggtctaacttcttttatatgccctagtgaaatccatgcccatacgcataaagcgagcacaagaaagcccgacacgccagaaactaagcggtggcttaattcaacaacggtttcaaatgttaaagggtcaggaatgagctgtccattacacagaggccaagaatctccgcacccgtctgctgaaccagttttcgtgacaagggcaccgccaagtagaataagtaacatggccatgctcgtcacaacggataaaaattttaatcccagtcgcacaataatcaccatcctaaaagcaaagtaagtaatataacgagctaaacaatttatcctaatctttttgtatattaaacataaatttcatttattctccataaacttgattgaatttgttataatggtagaaagtgtaaggtttattcatgagtttgactctgcagatatgtaaaaggtaccgtgcagaaaactattttacttgcacaaatatcttttaacaagtgacagggacatgcatttagctcatgacaaaaaaaatccatatttttttcatgaattattcacaaagtaacggcaaaatatggtttaataaacatgagaaatagatatttctctactattttaccgtttacatgtgaagcttttaagtagctttggtgagaggaatatgacttctttgtgaacaaagaggagatttttgtaaaaatatgttgaaaacgccttcatttatagactctttatttactagataaaagtctgtggatgagtaaaggaggaagcgccatggaagattcaaaaatggtggaagattcaacgctttctgcatcgcctaacacagctcatgtaagcgaaaatagttccgtttggtcagactttttagctacgattaaaattggaatagtcaactcgaatttcatcaccacctttactggtttttggctagctcttttcttcaacgaacaacacttcttagaaaacctggataaagcattttttactttaataggttcttcacttatcatcgccggttcatgcagtttgaacaattacatagatcgtgacattgaccctctaatggaacgaacaaagggacgacctacagtgacagggagttttacacctttgacggtccttgggattggaatcggttttacgttaaccggcttgcttatgctactagttgtttcttcagtagccgctctcattggattagcaggaatacttacatatgtagttctttacagcatgtggtccaaaagactatacacaattaatacagtaatcggaagtatatcaggagctgtcccgcctttaattggatgggcggctattgatcccaatttacatgtagtggcttgggtattatttttaatcatgtttatttggcagccccctcattttctagctcttgctatgcgaagatgtgaagaataccgggcagcgggaatccctatgttgcctgttgtacacgggtttgagcttacaaaacgacagattctcatttggattgcttgtttgttgccattacctctttatttatacgaattaggcactccatttctaattttggccactgttttaaacataggatggctatttttaggatttgctcaatacaataaacaagaagacacaaagtgggctagcatgatgtttgtctactcactaaactatttaactattttatttgtctcaatgattgtcgcaacgctttttgcctagataaaatctttcactgaatgcgacactgcacaagggggatttcttctacatgtagaattcattatagaaggaataagttttatgctcaagagggcatagatgaaatcacgtcaatgaaagagaggttggggaatggtatgaaaaaatggcgattgaactttcgcgttttgtcgttatttacgctgcttgcattcgtgttatcggcctgtggaaaaccgtttttgtcaacacttaagcctgcaggtgaggtagctgaagaacaatattcgcttatgctgcttagtacagccatcatggttttagttattattgttgtcaccattatctttatatttgttattttgcgctttcgtcgtcgtaaaggcgaagaaaatgtgattccaaagcaagtagagggaagcagaaagttagaaattatatggacagtgatccctatcttgctgctgattattttgactgttccaacggtcatctcaacatttaagctagcggatgtaaaaggaatgaaggacaaagatgctgtcgtagtaaatgtgcgcgctaacttgtactggtgggaatttgagtatcctaatcaaaaaattattacatcgcaagatctagttgttccaacggataaaaaagtctactttaacattaaagcttctgacgtcaagcactcattctggattccttcagttggaggaaagctcgatgctaacacagaaaatgataataaattctggctagtgtttgattctaaaaaatcgaaggaagctaacggggttttctacggaaaatgtgctgagctttgcggtccatctcattctcttatggactttaaagtacgggctgtatcaagcgatgaatttgatacgtgggcaaaagatttgaaaaaggcaaagcctgatgtagaaacagcatccgcaaaagctggtcaagaggtctttaatgaaagctgtatcggatgtcatgctgttgacgtcaaagacaatcgtccagaacaagctcgtcaagcaccaaacttagccggtttttctgaacgtgagcgtgtagctggggtgcttcctcacaacaaggaaaatatcaaaaaatggttaaaagaccctgaaaaagttaagccgggtaataagatgagtggtacatatcctgacttaacagatgaacaagtgaatgagctagcagactatttaatgagtttaaaagaaaaataaacgtccagtcgtttttaaaaggggaggtttagcgatgagtacactcagtcaaaagaagggtgtaggtggaacaatttgggactttatgacaaccgttgaccataagaaaattgccattctttatctaattgccggcggtatcttttttctagtcggaggagtggaagcgctatttatacgtattcagctggctataccaagcaatgactttgttagtgcaggaacgtataatgaaattttaacaatgcatggaacaacaatgattttcttagccgcaatgccgcttctttttgccatgatgaatgcagttgttccgctgcaaattggagctcgagatgtagcatttccatttttaaatttgttaggtttttggttgtttgcctttgggggactctttttaaatctaagctggtttttaggaggagcacctgatgcagggtggacctcatatgcttcgctgtctattgcatcacctggtcacggaattgatttttatgcgataggtttgcagatttccggagccgggacattgatttcaggtatcaactttctcgtgacaatcattaacatgagggcgccaggtatgacttatatgcgtatgccgctgtttacatggacgacgtttgttgcatcagcccttattttgtttgcgtttccagcactaacggttggattgtttttaatgatttttgaccgcttattcgggggaaacttttttgacgccacaatgggtgggaacaccattatctgggaacatcttttctggatattcggtcatccggaagtatatattttaattcttccagcgtttggtgttttctctgaaattttacctactttttcaagaaagagattattcgggtactcgtcgatggtttttgctaccgtattaatcggatttttagggttcatggtgtgggctcaccacatgtttacaaccggacttggtccaattgcaaatgccatttttgctgtcgctacgatggctatcgccgttccaactggaattaaaattttcaactggttgtttacgctttggggaggaagtattgagtttacgtctccaatgctgtatgctgtcgcttttattccatcatttgttatcgggggagtaacaggagttatggcagctgtagcacctgcagattatcaatttcaagattcttattttatcgttgctcacttccattacgttatcgtaggcggtgtcgtatacgctatattagcaggtgtcacatactggtggccaaaaatgtttgggaagatgttagatgaaaagttaagcaaagcaacgttctggctctttttgattggtttccacttaacgttctttattcagcatttcttaggactaatggggatgcctcgccgcgtatggacgttcttgcctaatcaaggtcttgaccttgggaatgcaatcagttcatcaggagctgctttcatggcggttgctacgctcattttactggttaatattataaaaacaactgccaaaggacaaaaggtaggaggagacccttggggagacggacgcaccttagaatgggctatttcatctccgcctccagagtataactttaaacaaacgccgcttgtacgcgggttagatgcatattggattgaaaaaatggcaggaaataaagaaatgacgccagccgaacctcttggtgatattcatatgccaaactcatcgtttattccatttatgatatcgcttggaatgtttattgcagggattggctttttgtatcgaaatgatcatgcgtggggagatattgtagggattatcggaatgatcgtcatgtttttatcgatgttcttccgttcatggattgatgatcacggctttcatattcataaagaagacttagttgatgatgacaaggaggcgaagatgtaatggagactgaacaaaagctaactgctgaaactttccctgcttcgcctgaaaaagcaacgcttgaagggaaaaataaatttactggcttttggctctttttaggcggagagacggttttgtttgcttcactttttgctacttatttagctttacgtaattcaacgatgtcaggacctaagccagaagaattgtttgatattaagcttgtttttgcagccaccatgattttattaacaagttcactaacaagcgtatatgctatgtatcatatgaaaaattttgaatttaaaaagatgcagctatggttaggcgttacgtggcttttaggtttagcgtttttagggctagaaatttatgagttcaggcattatgttcatgaagggcatacgtttacaagcagcgcatttggttcttctttctacgcgctggttgggacccacggagctcacgtaacgttcggattgctttggattggttctttgatgattcgaaatgcgaagcgggggttaaacttatataacgctcctaaatattatgtcgcaagtttatactggcactttatcgatgttgtgtgggtctttattttcacggttgtatatttaatgggaatggtgggataagctgatgacgacaaatcaatcaaactcagataacccaaggctcaatttagattatcgtaaaaaaagaaacgcagaagatatgaaaatgcaagttatctcttttgggatgatgttgtttctaacgctaattgctttttttgcggtttatcaagagtttagcggatggtacattatgccggtgattgtgctcttggccgttgttcaagtcatctttcaactttattatttcatgcatatgaaccacaaaggacataccataccagcatttttcttgtattcaggtgtattggtagctcttttaaccattttagcttttgtaaccattatttggtggtaaagaaaagggctggcatgcgccagtccttttcatcatctgtagaaggagggatagacgttgattaacaatttgcagatgtttggttttgaagcactttggagtccttactattttttaaccatttgtctggtgaccgccttatattttttcatcgttggtagatggagagggaattttataggagcggtggccgtaaacagaaaaacaaaagcgtattttgttattagcatggttcttttatatatatgtaaaggaggacccgtagatttactagggcattttatgtttagtgctcatatgacgcaaatggcaatcgtttacttggtgattcctccgctttttattttaggaattccgccgtggttagctcgttctgttatttatgtaagaggagttaaacctatttttaaattctttacacagcccttaattgcgctactattattcaatgggttattctctttgtatcatattccgctgctttttgattttattaaaacggatatgatgctccacggaatcgtgagtgttgtattatttgtcgctgcattttgcatgtggtggccactcgttaatcagctagaagaagaacaaaagctaagttctttaaaaaagcttggatacatttttgcagatggcgtactccttactccagcatgcgcgctgattatttttgcaaatcattctttatatgcgacgtatacagattcaagcgcttgggtacaagctctttccctttgtgtaccgccttctatgatcgcaagtttagggcagcttgctcccgagatgtttaatacgctgccgcccgtggaagatcagcagctaggcggcgttattatgaagattattcaagaaattgtgtatggaacggttttaggatttattttttttcagtgggctcgaaaagaacgagagaaagatacgtacatgcccgattttactgagcctcaagatataaaaccaaaggaattttcgactactcctcctttgaattaaaaaaagcgcagtgtgattactgcgctttttctaattctatagctgaacggtttcaagctgtgatttgatttgtgctaatatcttttcacactgttctacaagagatggtggaaagtattcgccgtctccatattctacaccgtgaggataataatgtttgcctagcagaggtgtcataaggtgaataacagcatgcctgccccctacatcgcctgaaatagcatgtccttggactcgcaaatagaaggtatctcgctgaaactcgaattttcgatcgtacgtgacgcgttcataatcccattgtccggcgcggaccagaccaaattgatgcataatctcatctaataaatctaaatcaacctttaatgaatcaaattttgcatattcaaatttcatatgaactccctcccaaaacagatataccccaattaaatcataagccgaatggataaaacttgcaatatctaataaggaaaaatgtaaacgttatctatttttatttaaacgttttaaatacgaaagtttactaaaaagttggtcacactataaaacgagcacacgatgtaaaggaggatgaaacaatgaaaactgtacaagaggtaatgacagctgatacggaaacatgcaccacgcttgataacgtatatgaagtagcagtgaaaatgaaggaatggaatgtaggagcaattccaattgtcgatagagatcagctagtaggaatgattacagatcgagacttagttataaaaggcatcgcagaaaagaagccaaattcaagtaaagtaacggatgttatgagtgaagagcttataactattacagcggaagcctctgtagaagaagcttctaagcttatggctcaacatcaaatccgtcgtcttcctgttgtggaaaatcaaaagctagtagggattgtatcgctaggtgatttatcaacgtttcgctatgcaaatgaacgtgcaggagaagcgctctcagacatttcacaacaaacgcattaaaaagcgaaagccaactgtttgcagtatattcgtaaatagttggctttttcttttgtttccttcataccgatagctatttttttttgaatgcatgtataatagagataaaaataagttaaacaggtaaagaaaacaggtgtaaggagaggaagaaaagctgaaaaaagttatttttattctcgtattaatagtggcatttgtatacgcggaggattatttacctcagctagaaaaatatctaaccggtcaaaatattgagcaaaaccaaacggattccaaaagtcagcccacacaagaagtggcttcttatgaaaaacaaagtgaaaatatgatgaggctcattggagatcattcagaacagttaattggaatgcttggagagccggatcgtattgattcttctgcatatggctatgattggtggatttacaaaaagaatcgtcaaacttatgcgcaggtaggagtagaaaataatcaagtcgtatctgtatacgtcattggctcaaaaacaaatacagatccttttgagattggtgagaagcgagaggaagtagaaaaaagagtttcactttcatcggaactcacgcttcaaaaagacggaaatgaataccgatttcgtctgagtgaagaggatatgaaaatgcgtcccattattaaatatggagatgtatacgtccaactatattttgatcagttccttaatacaatctcaagtattcgaattatggacatggacacgctattaaaacagcgtccgtacgaaattgtttaccgcggcgagcttcccacagctccgtcattgacatcggaggagtggaaaagtgtccaagaaggagaagaacagcaaattatcgatattacaaatgtaattcgagaccggtttcagctgtcgcctttagcttgggacgaagccactgccggtgtagcttatttacacagcaaagaaatgagcgacttaaactatttctctcacgtttcaccagcacaaggtgatttaggcaaccgtctgcaaaaaggtgatgtagtataccgtatcgcgggcgaaaatattgcctcgaattatcaggatggaatcgctgcggttgaagggtggcttaatagtgagggacatcgtaaggctttactcaataaagagtttacgcgtcttggtgtaggtgtatatgagaaatattacacgcaaaactttatcactccgatgaatgaatagtaagattaaaacttccttttgaaaattggtctactcttgtcctctttctcataagttttagtagaggttagaggagggacgagaatgaaaggaagaatagtaggaatattgctcgtacttttctttgcatatacgactactgtacatgcagctgaagggcagtgggaaaagcttgataacttatctgatcaaacgctatcgcttgtagagcaaaaggagtataaagcagcccaacatttgttcagaaacttttcgaatgaatttaccagtctcaatacagcttctttgggcgtatcggccgaagatatacgtattttaactctttgttatgaacaggtagaaaggtctcttttatcttctgattccagtgatgaagaacgtcttcaaaaagctactcaatttcgattgttagtcgatgcgctgcacagcaagcatcagcctatgtggactgagctcgaaggcagtatgctagcaacatttaaagagatgcgaaatgaagcggtaaaaggagaacaatcggcttatgaagcgcagcttaagcaatttttgaaggaatatgatatgatcttaccgagcgcgcaggtagacgtgtcgtctccctatgtacagcgtgtgagcgcggacgttcactttttacaaactgaaggaacgctaagtgagattaacgatgagcagtttaaccaaatggaacaaaacttaaaagatttttttgaacaagtaaaagaaaatcgtacagacccgtcttttatttgggttacaattaccaccggaagtattattattgctacacttttttatgtaggagcgcgaaaatattttgctgaccagaaaagaaagtcagctagagggcgtaatgattgacgtaaaagcgcagaattgtctaaaataaaagagtagtcaaacacataatgaaaggtgtgggtaaatgagctttttgatttattttctcattattatccttgtgccaatttgggcacagtttaaggtgagaagtgcttacaaaaaatattcaaaagtaagcaactcatcaggaatgacaggcgcagaagtagcaaggaaaattttggatgaaaacagattgtacaatgttcacgtagagcctgtaggcggatttttatcggatcactacgatcctcgctcaaaagtcattcgtttatcagaagacaactactacggaacgtctgtcgcaggcgctgccgttgcggctcacgaagtgggacacgcgattcaagacaaagaaaactattcgtttttacgccttcgtcactcgcttgtgccggtagcaagtttagggtctaacgtatcatggatcttaattatgattggaattatcgcgcaggctagtgggttattactacttggaattatcttcatggcagcagctgtcgtattccaacttgtaacactgcctgttgaatttaacgcttcaagccgagcgatgacgcaaatcgtctcagtcggagcgattagaaatgacgaagagcgcgagacgcgtaaagtgcttaacgcagcggctttaacatacgtagcagctgcagccgtagcagttcttgagttggttcgtttaatcatgatttatacaggaatgaataacgacgactaaaaaaaataccgcattagcggtatttttttatctttcaagcggttttttattttcatcaagggtaaatccttcgcctaagacatcatgaacatccgtaactgcaacgaatgcgtgcggatctacagaagtaataacttgctttaaacggaaaatttcatttttactaaccacgcagtatagcacgttggtatcttgcttagaaaaagaaccttgtccttttaaaatcgtcacgcctcgatccatttctttcataattttatccgatatggcttcgttatgatttgaaatgatcgttgctcctttggcggcatacgcgccgtcttgcataaagtcaataacccgtgcagcgacaaagactgcaacaagtgtgtacatagcttctcggtaggataaataaatgagagacgcactaatcacaataaagtcaaaaagaaacatcgttttccccatattccacccgatatatttttgcacaacacgtgcgatgatatcgactcctcctgttgttcctccaaacctgaaaataatgccaagacccactccaataaaaacaccggcaaaaagagctgctagagtcatatcatgacgtaggggcatattcactgggaagcgctggaatatccataaaaatagggataagctaacgactccgagcatggtataaataaatgctgttctccctaatagtttccaccctacaaaaaacaaaggaatatttaacactaagttagaataagagggatcaatgttaaataagaaaaataaaagcagggtaatgcctgtgaatccaccttcagctaaattgttttgcatgttaaaattaacaagtccaaacgcaaatatggcagcaccaagcagtataaaaataatattttttaatctgagacctttcatacttacaaacctcctatgaccgtttttgcactaccttatcataaaggaatatatttcatttcgtaaataactatcgaaaagatttttgaaaatagtaaaaagtgatgatgtttcttctagtgctatgtattagtagtatcctcaattcgtaaaatatagacagatttttgagaattaagggcaacgtgaggaatattgtgaaagagcatctgataaaggcttggtaagaagaagtaattacactaaataatttgaagtaaagatgttataatagtaagctgagtgtacttctaaaagaggtgaaataaaaagatgtcaaaaaaaacgatggagcaaatgcaacaagaagttgatgcatatattagccaatttaaagaaggatattttagtcctcttgctatgcttgcgcgcatgtcggaagaagtgggcgaattatcgcgcgaaattaaccactattatggtgaaaagccgaagaaaacgactgaagcagaacgtacggtcgaagaagaaatgggcgacattttatttgtattaatttgctttgcaaattcattaaatattgatttacaagaagcgcatgatcgcgttatgaataaatttaatacgcgtgacaaagatcgctggacgaaaaaagaagactaaggagagaaaaagaatggacaaaattcgaattgtacttgcaggaccaagaggtcgtatgggaaaagaagctgtattattaatagaagaaacagagcattttgaattagtagcagcggtagatcgtatcaatgaaggaaaatacataagtgatattgaaggaatgccaaatgtacaggcaccaatctacacggatattgaaaaatgttttcaagacgttaaggcagatgttttagttgacttgacaacacctgaaattgggcgcgttcatactaaaacagccctaacatatggagtaagacctgttgtaggaacaactggcttttcagaagaagatttaaaagaattacagcagcttgctgaagagaaggaacttggctgtatcattgcacctaattttgcgattggcgctattttaatgatgaagttttcacaaatggcagctaagtactttgatgatgttgaaattattgaaatgcatcacgatcaaaagttagatgcaccatcaggaacaggcttaaaaacagcggagcttatcagtgaagttcgtgaagcaaaaaaacagggtcatcctgaggaaaaagaattgctagaaggggcgcgcggtgcagattatgaaggaatccgcctacatagcgtacgcctgccagggctgattgctcaccaagaagtgatgttcggaggatttgaacaaacattaaaaatccgtcatgattcatacaaccgtgcttcttttatgtcaggtgtgaagctagctgttgacacagttatgaacgtagacacacttgtatatggattagaaaatattattgactaaggagcgagaaaaatgaaaatcgccttaattgcacatgataaaaagaaaaatgatatggtacaattcacaacagcctatcaagcgattttacaggaacattcgctgttcgcaacaggaacaacaggaacgcgtatttcagaagcaacaggtttgaaggttcaccgctttcaatcaggaccgcttggaggagatcaggagataggagctttaattgctcaaaatgaaatggatatggttatttttttccgagatccgttgacagctcagcctcatgaacctgacatttcagctctgatgcgcctatgtgacgtctatgcggttcctcttgcaacgaatatgggaacagcagagattttaattcatggacttgaacgaggcgatttgcattggcgttcaattataaaaaaatagggtgaagataatgaaagaaacaatagatatccttgcctttggtgctcatgccgatgatgtagaaatcggcatgggtggaaccattgcaagaatgagtgaacaaggtttgaaggtagttatttgcgatttgacgcaagctgaactttcttcaaatggaacggttgaaattcgaaaacaagaagcgtctaaagctgctgatgtcttaggtgttcatgagcgaattcatctgcatttaccagacagaggtttggttttaaaggcagagtatatagctgaaatagcatcagtcattcgcacgtatcaaccaaggattatatttgctccttactttgaagatcgtcatcctgatcatggaaattgtgcaaagcttgtagaagaggccatgttttccgctggcgttaaaaattatatcgattataaaaagcaaaaagctcatcgtgctgagtctctttatttctatatgataaatggatttcataagccagattttatcgtagatgtatcaagcacgtttcaaaagaaagtagctagtctagaggcttatgaaagtcaatttataaaaacagcagatacgtttgatacgccgctggtaaacggatatattgaaacggtagagagcagagagcgattatttggcaaagaagtcggggtagcatacggtgaaggttttttatctaaaaaaccgattttgatgtacgacgatttagtaggtggaaaataaatgaagttaaaaattggtattacatgttatgcttccgttggaggttcaggagtggtagcaacggagctagggaagctgctggctgaaaaagggcacgaaattcattttatttcctctagcatgccttttagattgacgaaagtatatccaaatatttattttcacgaagtagatgtaaatcagtactccgtctttaaataccctccgtatgatctggctttatccagtaaaatggctgaagtggctaaaagagaaaagcttgacattattcatacgcactatgcaatcccccatgccgtttgcgggattttagctaaacaaatggtggagcacgaagtgaaaattgtgacgactcttcatgggacagacattacggttctaggagaggatccatcgttaaaagacttaattaaatttggaattgagaaatcagatgcagtgacggctgtatctcagtcacttgttgatcaaactcaccatttgattagtccagataaagaaattgaaacgatgtataattttattgatgaacgagtttatcataaaaaagaagtgcagtatttaaaagcggagtatggcatattagaaaatgaaaaagtcgttattcatatttcaaactttcgtcaagtcaaacgagttacagatatagtcaaaacatttgctattattaataaaaagcttcagtctaagctgctgcttgtaggagacggccctgaaatgacggttgtgtctcaattagtaagagagctaaatcttcaagattctgtattatttcttgggaaacaagaaaatgtagcagaattatattcgattagcgatttaaaactgttattgtctgaaaaagaaagctttgggcttgtacttttagaagctatggcctgtggtgttccatgcatcggaacaaatataggcggaattcctgaagtaattgaacacgaaaaaacaggatatatttgcgaagtgggagacgtcgaagacgcagcgagcaaagcaattcagctacttgaaaatgaacagctgcatcaccaaatgagggaagcgtctctaagcgcagttaatcataaatttcattcaacagagattgtgagtcaatatgaaaaactttattataaattggtacagggttgaagaatggaggaagttatgaaagaaccgttcattcatccgctttatgttattgaaaaactggagacagccggttacgaagcgtattttgttggaggagcggttagggatctcattttaaatcggacgattggagatattgatatcgctacgtcagctaggcctgaacaagtgatggaactctttcctaagacgattcatgtaggaatcgagcatggtacggttgtcgttgtccatgaggacgagacctatgaggtaaccacttttcgctctgagggagaatatgatgattttcgtcgtccctcgtccgttacgtttatttcgtctctgatagaagatttgcagcgtcgcgattttacaatcaatgcaatggctatgaatgcaaaaggagaaatcattgatccatttaatggaagagaagatttgcgaaaccagttaattcgtactgtcggaaatgctaaagaacgctttcatgaagatgctcttcgtatgatgagagccgttcgctttgtcagtcagctggcgttttcgctgtctgatcaaactaaaagagccattcaacaatacggtgaactgctgaggcatgtttctattgaacgcattacagtggaattcgaaaaaatgctgagcggaaagcgtccgtctttagcattagcacttgtagcagatacggagctatatcgctacttgccccaattgaatgtagatccgcaaaaattccgatctgtttgtgcacacgattggatgatgcttcagcgagtatcggagtcatggacacttctggtacatctactcgacattcaagacaagcaggcattttttaaaagctggaaattatctaataagcaaattaaagatattcagcttcagtctattggtcttcgagacgttttggaaaatggatggtcaaaacgcatcatgtatacaattggagagcaggccagcgtaagcgtgaatcgtattttacaacttcttcgaagcaatgagcatatgaatgaacatgagcttctttacatctatagcgagctgcctattcattctttaaaagatttagatataaatggtcaagatcttttagtgtggacaggtaaaaagggtggtccatgggtgtctcaactgttaaaagaaattgaggagaaagttctatacaatgagttaatgaacacgaaatcttcaataagaaagtgggtgcagtcttgcagtcagatataagaagaacgctgcttgaaatgtttacgaacgcagatggggactatgtctctggccaaaagatcagcgatttattaggctgttcaagaacagctgtatggaagcatatcgaagagctgcgaaaagagggctatgaacttgaagctgttcgtaaaaagggctatcgtattgttgggaagccgaacaaagtaagcagcaacgagcttttattagggctccaaacaacaaaaatcggtcagtatattcattatgaggaaagcgtgcattctactcaaaagattgctcatcgaattgctcaagaaggagccaaagaaggaacggtcgtagttgctgaagagcaaacggcagggagaggaagacttgatagagcgtggtattccccaaaatatactggtgcctggatgagtattatactgcgtccttctatcccaccgcagcaggctcctcagctgactctactatcagcagtggctgttgtacaggccattcaagaagtgacgaacctttctccagacattaaatggcctaatgatgttttattaaatgggaagaagctagttgggattttaacagaaatgcaggctgattttgaccggattcattcggtcatcattggaatcggcatcaatgtgaatcagcaggaaacggattttaatgaacaaatcaaacacattgccacatctttacgtattgaaaaaggtgaagaaattaatcgtgcagctttgatgcaagcgtttttcttaaagttagaaaccctttacgaagaatacctaaaaaatggctttggtttaattaaagttctttgggaaacgtatgcaattagtattggcaagcgaattatagcgcgcacgatgacagccaacattgaaggctttgcaaaaggcataacagatgaaggcgttttattgattgaagatgatgaaggagttatacaccgaattcattctgcagatattgagctctctgctaaaaaatagtagaaaaataaagaaatttttattataatacgagtatcaaggtagtatcgcaagaacttcacttgatactcgtttgtttatttttaatacgacaataaatctgccttgatccattaaggactaggacagagggatgacgcataggtaagcacattaggtaaagtgtgctttttatagatgaagtctgtcaaagtccttcttccttttataggtagaagggctttttgtgtgcagacgtgcgctcatctcctctgagaaggaggagaaagttagtgaaaacaaaattagattttttacgtatgaaacaaaacaatgaaccaattgtgatgctgaccgcgtacgattatccgtcagctaagtacgctgaggaagcaggcgtagacatgattttagtaggtgattctctaggaatggtcgttttaggatatgactctacgattcctgtaacggtagatgacatgattcatcatacaaaagcggttaaaagaggagctgctgatacatttatcgtcaccgacatgccatttatgtcctatcacgtgtcgaaagaagacacgatgagaaatgctgctcgcattatgcaggaaagcggagctcatgctttaaaagtagaaggagcaaatgatgttctctatacaatttcagaattgacgcaagctggtattccggttgttgcacatctcgggttaacacctcagtctgtcggtgttctgggcggttataaagtgcaagggaaagaagcgaaagaagcaaaacagctaatccaagacgcgatcaagtgtgagcaggcgggagctattgctgttgtattagagtgtgttcctaaacaagtagcaaaacaagtagctgaacgcttaagcattcctacaatcggaatcggagcaggagctgacacggatggtcaagtacttgtataccacgatatattaacgtacggcgtagagcgtgtgcccaaatttgttcagtcatttgcgaaaataaatgagcctatttcacaagggctttcacagtatgtaagtgaagtgaaaaaaagagagtttccgaaagaagcacatactttttcaatgaaagaagagcagttaacggcactgtacggagggaaataagatgaaagtcattacaacaattaaagacatgcagcaggagatgaaaaaagaaaagcagcttggacattcaattggatttgtcccgacgatgggctatttgcatgaaggccacgctactttgcttggagcagctcgcacagaaaatgaagtagtggtgctaagtatttttgtgaacccgactcaatttggaccaaatgaagattttgatacgtatccaagagattttgaacgtgatgagcgcgtggcaaaagaagctaacgtcgactatctattttatccttcagtagaggaaatgtataagtcaagccgttcagttgctataaccgtgacagatcgtgtagacgtattgtgtggacagaagcgccccggtcatttcgatggagtagctacggtactaacaaagctttttcacattgtaactccagatcgtgcatactttggtaaaaaagatgcgcagcaagttgctgtagtagatggcttaattgaagactttaatttccccgtggagcttagagcagtagacacggtgagagaagcagacggattagctaaaagttctcgtaacgtatatttaacagataaagaaagagaagaggcacctgttttatttaagagtttacaaaccgctctgcagcttcttgaaagcggagagaagcatgtagaaatccttaaagggaccattcgaaaagaaattgagcaacatacgagcggtaaagtggattatatcgatgtttatacgtatccagagctaaaaacgattaagcaagccgctggcaaaatcattattgctttagctgttcaattctctaaagcccgtttaattgataatgtaattgtagacgtacagggggataactaaatgtttcgcacgatgatgaatgccaaaatacacagagctcatgtaactgaagccaacttaaattatgttgggagcatcaccattgatgaagatatcattgacgcagtgggaatcgcagcaaatgaaaaagtccaaattgtaaacaataataacggagctcgcttggaaacgtacgtgattcccggcgaacgcgggagcggtgtagtttgtttaaatggagctgctgcaagactcgtgcagcctggagatattatcatcattatctcttatgcgctcgtagcaaatgaagaagtagctcaccatcatccaaccgtagcgattatgaatgagcagaataaaatccaacaattgcttaaacaagaaccagctggtacaattctataagaacagtccccctttatgagggggatttttatttgaatacatacgctagtaagtgaacggtataaacctctatacacactaaagtaaaacttctatgtatgaaagcctctctgtttttcacgagaaggagttgcgcttttaaagcatatagagcaggctttcactttatactataaaaagacagacttgcgaggtgttgaccgtgaataaacgctttgttgtggtagatcttgaaacgacgggacattctccaaaacaaggagataaaatgattcaatttgctgctgtcatagtagaagacggcaaaattgttgaacgtttttctagttttttaaatccgggtatggatattccgccttttattacacaactaactaacattcaaaatgatatggtgaaagatgcgcctttatttgaagaaatttcacctaaaattatagaattgctagatgatgcttattttgttgcacataatgtggcatttgatttaacttttttacaagaagaactctatcagtgcggaagggagacgctttataattcaacggtagataccgtcgaactggcccggattctgctgcctacagttgatgggtacaaacttagccaattagctgagtatttacatattgaacatgaaaaccctcatcaagcagatagtgatgcagaagtaacggcacgtattttactattactaattgaaaaattaaagaagctacctctaacaactttaaagcagctgtatgcgctaagcttgcactttaaaagtgaaattggagaactgattcaacaagttatagatgataaaagttatgccgaggatgattcttatgaatttatacatggcattgcgctaaataaatatcagccgcattcagctaatgaaaagcagcactctcatacttacgaaatatttgaagctgaaaagcaaaagctgttccatcaggctctgccattgtttgaagaacgaaaagggcagtgggagatgatgaactttgtacaagagtgctttgcaggtaatgagcatgctttaattgaagccgggaccggtattggtaaaacctacgcttatttagttcctgctgtgttttatgcttctgttcatcatcaaccagtcattatctcaactaacacggtaacgcttcagcagcaaatcatcgaaaaagatgtacctattctagaaaagattgttccgtttcctgttacagcagctgttttaaaaggaagagaacactacattagtataagaaagtttattcagctcttaaaagagcgcaataataattacgatgcaatcctcacaaaagcgaagctgcttatttggctgacggaaacggaaacgggcgacagcgatgaaataaacctgccttctggcggcaaacttttttgggaacagctaaatgaaagcaatccgtctccaagtgattttaagcatccttggaaactttattctttttatgaacgagcgcagaacagggcgcaaaatgcccatatagtagtgacaaatcatcgcttgctgttgatggatgtgatgagtaatcatgagctgctgcctgagtatgaacagattattattgacgaggctcatcacttagaagacattgccggagaagagctgggagagcgcttagattattttgcggttcatgcgctattaaaccgaatcggaaccattcaagacaaagggctgttaaaaaaaattcatcatacgtttgtaaaatatagcatcgagcttaacactgaatttcttcaaaggctgtttgtgcagcttcattctgagtgcgatgacttatttcgtttgattcattcttttgtccaaaaaagaatcggcaatcagcagggtgagattggaagaagcagctatcgatataaagtggaaaaagagcatgggcattactggacggctattcaagaagcagcgtcgcgcattcgttttttaattcacgatctttttacatggaatgatggggcaagacattcttttgacgaactatatgacaaagtcacaaaaaatgaacagtcgtctcttcatgaatttcaaacggctgttaaaggatttgaacacatatctcagcaaatagaaaagcttttgttcaaacagcagagtcatcacgtaacgtggtttgagattgaaccaaaaggagcagcgaatgctacgtatatctatagtcagcctacttccattgccgatacgctggctgatgaatttttcgccaagaaacaaagcgttattttaacatcggctacattgacggtgaatggaacatttgattatttaattcaagagctagggttatatgactttcagcctgctcaactcattctcccttctgagtttgattatgagaagcaagctagagtctatattcctcaagatatgcctgctgttaacgaagtatcattatatgagtatagcgctatgatggcagaaagtattcttgacgtagctaaagtaacaaatggtcgtatgctggtgctttttacttcatatgacatgttgaaagctacgtatggttatttaaaagagttaaacgatcttgaagagtttgtactgctcggtcaaggagtcacaactagaaatcgtaatagactgctaaaggacttcagccagtttgagcattccattctattaggtacaaatagcctgtgggaaggaattgatctgccaggagatttattatcatgtctcgtaattgtcagacttcctttttcatctccaaatcaacctctgctgacagctaaatttgagcagatgaaaaaagaaggaaaaagcccttttatgaattattcacttcctcaggccgttatccgttttaaacaaggatttggacggttgattcgttcgaaaagtgaccgaggagctatatttatttttgataatcgtattacgcgaacagcatatgggtatcatttccttcactcacttccaaaagtccaggttgttcaaaaaacgttttcggatgtcttactggactacaaagaatggtggaatgaaaagacttgagcatacgcttaagtctttttttatgcatactgtttcttcacttgagagacgatagtaatatactatgataagcaaatgaggacagtgtatgattaaaatattaataagtgccgtactgttttttagttttatgaactgttcggtttcagcagccgtcattaaaaacgtagattttggtttacaagttgatgaagtagtgatcacctttttacctctttcagctggagaagcgagtctgattcaagacggaagcggtgagactattttgataaatactgggaatgcatcttcctatcccgagctaaagaagtggttgaagcgatataaagtgaaaaaaatcaaccaattagtgattacgaaacagcaaaagtactatgattcaaatgttcagcgagctgtgaatgattatcatatagagcgtattattgtccccgctcagtaccaggcggaatttcaaacagagaagtggaaagaaaatgatttatttcagttaacaaataatatacacgttgatgtcttgcatgcatcgaagcaaaaaatagcggctatggatctattatttacgatcggagaacatcggattctatatgcaatgagcagctcagatgaagtagaagaaaagtttttacgcattcctcttacccatgtagatgtattgaaaattcctgattttggagagggaacgtttttttcgaatgcatttttgaagcaattagatacacagcttgcggttgcgtttacgaaaccaggccgttcctattcccctcgactgctttcaaatttaacagctgaatggattgagttatatgatgtaagagaggggagcgcttactctattaaaatgtcgctaaaatcctatgatgtgatgaaattttctgcaaaataaacaaatttccttttgcaaaaagaggtaaattccttataatattatatatgtttacttatttattcggtttttacgcaaaacgtacagacgggattgatgagtgaaaaagatgacgatggtttttgatacctgttataatacggatatcgtcatttttgcgtcgtgatagacgagctaggaggtttacaatggaaagtaggattgaagtattatcaactgtccgcgtggaaaattcctcggatttatataaaattgttgatagtttgaatcgcacgttgaaaaagcaagatttgatgttcggattagcgttagatgaagaagatcaaagcaaagctgtatttacaatttatcgtacataagtagggattttatgaaaaagttaattattgtagcggtagctgctgtgcttttaattatcggaggcatttcttttagcatttatcactcgtccgttaaggatgttcagtctgctgaggaaaaagcagcatcccaagcaaaaaaagaatttaatttgaaatctgtcacaagcacccagccatatttcggcaatcatgcattttatgtagtagaaggtacaaaccgaagcaatcaaaaggtaattgcttggatgcctaaaagcaaaaaacaaacagctgttttaaagaaagcaagcagcgggatcacaaaagagaaagccatttccattgtgaaaaatgataaaaacccgcaggaaattaagtcggtgcgcctaggcattgaaaataaaaagccgctgtgggaagtaacatatgtggataaagataagaaacatttaacatactattatcttgatttctctagcggtgaatttataaaacgatacagcttatctcaatcataaatcgtttataccatatgaaataccatatgtgtcataatataagatttcagcgctttatgaaaatgaagccaattttttatctataatcagcccgcgggctgattatagctttagttcatagggggagattttagtgaagttagcaaaacgtgtatcagcattaacgccatcatcaacattagcgattacagcaaaagcgaaagaattgaaagcggctggtcatgatgtgattggacttggagcaggggaacctgattttaatacgccgcagcacattttagaagcggctgttacagcaatgaatgatggtcagacaaaatatacgccagcaggcggccttgcaccattaaaagaagcggtaattgaaaaattcaaacgcgaccaaggcctgacgtattcaccttctgaaattattgtttgtacaggtgctaagcacgcactgtatacgttatttcaagttctgttagacgaaggtgacgaagtgattatcccaactccttactgggtgagttatcctgagcaagtaaagttagcagaaggtacaccagtattcgttgaaggttctgaaaataacgaatttaaaatcacacctgaacaattagaagcggctattactgctaaaaccaaagctgttattatcaattcaccaagcaacccaacaggtatgatttacacaagagaagagcttcaagctttaggagaagtttgcttgaagcacgatatttttatcgtatcagatgaaatttatgaaaagcttgtatatggtcaaaatgaacatgtatcgattgcacagctttcaccagcgttaaaagaaaaaacaattatcattaacggtgtttctaagtcacattccatgacgggctggcgtattggatatgcagctggtgatgctacagttattaaagcgatgacaaacctagcgagtcacagcacgtcaaatccaacatctattgctcaatatgcaacaattgctgcttataacggcactcaggagccggtggaaatgatgcgacaagcttttgaagagcgtctaaacgtaattcatgaaaagttgattaacattccagggttctcatgcttaaaaccacagggtgctttctacttattccctaatgcaattgaagctgcaaagttaactggttttgatacagttgatgcatgggtagaagctattttagaagaagagaaggtagcgctagtgcctggatcaggattcggttcaccagaaaacgtacgtctttcttatgctacatcactagatttgctagaaaaggcattggaacgaattcaatcattcatgactcgtcacatgaaataaaaaaataacaataggtagaaacaaaagagtcttttagcacaaatcacacgtgttagaaggctctttttgtttgttacttgttattatgtttgtcgaaatgtataataggatggcatacataattacgaaatgtaagttttttggagggatattaatcgtgaaaattacgatttcagaagcaagcaagcatgtaggaaaagaagtaacaattggtgcttggttagcgaataaacgttcaagtggtaaaattgcctttttacagctgcgcgatggatcaggatttatgcaaggggtagttgtaaaagctgaagtagaagaagaaacttttaaattagctaaatctatgacgcaagaatcatcactatatgtaacaggtatagtacgtgaagatgagcgctcaccgtttggctatgaattaacagttacaagccttgaagttattcatgaagctgttgattatccaattacgccaaaagaacatggaacagagttcttaatggataaccgtcatttatggctgcgttctaaacgtcaacatgctgttatgaaggttcgtaacgaaattattcgtgcaacgtatgaattctttaacgaaaacgggtttacaaaagtagatccgccaatcctaacaggaagtgctcctgaaggaacaacagaattattccacacgaaatattttgacgaagatgcatatctttctcaaagtggacagctttatatggaagcagcggcaatggcgcttggaaaagtattttcattcggtccaacgttccgtgctgaaaaatctaaaacacgccgtcatttaattgagttttggatgattgaaccagagatggctttctaccaattcgaagataacttgaaagtacaggaagagtatgtgtctcatgtcgtacagtctgttttaacaaactgtaagttagagttaaatgtactaggccgtgatacatctaagttagaacaaattaaagcgccattccctcgtatttcgtacgatgacgctcttaaattcttacatgaaaaaggatttacagacattcagtggggagatgactttggagcaccgcatgaaacggctatcgcagaaagctatgacaagccggtattcattacacactatccaacgtcattaaaaccattttatatgcagccagatccaacaaatgaagacgtagtattatgcgcagacttaatcgcaccagaaggctacggagaaatcattggaggctctgaacgtattcatgatcaagagcttttagctcagcgtgtagaagagcacaaattagatactgaaacgtataagtggtatttagagcttcgtaagtatggctcagttccacattcaggatttggtttaggccttgagcgtacggtagcatggattagcggcgtagaacacgttcgtgaaacgattccattcccacgcttattaaaccgtctatacccgtaaggaagtgaaaaaagtattctgactcttgtagtcaggatacttttttagctttttttatgaatcataaaaagaaaagaaaaacgaggcttttacttatatcataagaaaacaaaggcaaacatagaaaagagcctaacttaaaagggagttgcaattctcgaaaaaataagttagtgtaatattcttggaaggaagtcatcgttcatatatattttatatgtgcagagcaatggtacggtttcagcggaaagttttacatagaagcttttttagcttcgaataattattactttgactataaacttcatgatatactaactactgaggtgttcggatatgaaaaaagaaacgttaattgaatggtttgaacaaggcacagtttcaattccgaagctgctgtttaatcactatagcgatttgggaatgaacgaaacggaattcatgacgttaatgcatatttatgtttccattgaaggcggtgaaggtttcccgacacctaacgaattggcggcaaaaatgagtatttcaagtgctgtctgtatggatacgctgcgagcattaattcagcgcggctttttatctattgagcaagatcaacagcaaaacgcccttatttgtgaacgttattcattaaaaccgctttgggaaaagcttattcatcatatgatgcaagaaacaagagaagtagaaaaaagtgaagaagaacaagaagagcttaatttatatacaatgtttgaaaaagagttcggcagagcattgtctccgtttgaatgcgaaacgctagcgatgtggattgatcaagatcatcatgatcctattattattaaagcggcactaagagagtcggtgatgtctggaaaattaaacttccggtatattgatcggattttatttgaatggaagaaaaatggtattcagaccattgatcaagcccgcaagcatagccaaaaatttcgtcaaaatcaacagcccaaaaaactatcttctgttaacccttctcagtctacatcagccattcctttttttaactggctagagcaatgacaggataaaaagctgtttcaagatccaagtaattgaatcttgaagcagcttttttaaaagaatatggacaaaagtagcatttgacaggaaccctattgtaaaataggagggaactacctgtaaggagaaggagaactagtatgttaacgttaaaacaaatcagacagtgcctagatgctatggcggaaatgtttcctgacgcccactgtgagttaaatcatcggaatccctttgatttagtcattgctgtggcgctatctgctcagtgcacagatgctctagtcaaccgcgtaacagcggatttattcaaaaaatatcaaacgcccgaagactatttagccgtttcgttagaagagctgcagcaagatattagatcaatcggcttatatagaaacaaagctaaaaatattcaaaagctctgccgtatgctcattgatgagtatggaggagaagttccaacagatcgtgatgagctgaccaatcttccaggagtagggcgtaagacggctaatgttgttgtatccgtagcttttggagtaccgtcaatagcagtagatacgcatgtagaacgtgtaagtaaacgccttgggatttgcaggtggaaagattctgttttggaagtagaaaaaacgctaatgagaaaagttccgaaagatgaatggtcagttacgcatcatcgacttatcttttttggacgctatcactgtaaggcacagtctcctcaatgtcatgtctgcccggttcttgatctttgccgagaaggaaagaaacgaatgaaaggaaaagagaagaagatagatgttaccgattgaagtgccgtcacatttcatatgcgaaccattctattcaaaagaagatcggattcttgaagtgggtggaaaaaattattttgcttatgatattttatacgatgtacataaagaaacgaaaacaccctggagggatgttcaaaagaatatacggccattttttgaaaagtgggaaactcaaagggaagaactgcatacgcttttttctctgcgaaaagcaaaagaagcagccccttgtatgaaacaagctgctgctatgtatattagtttactgttttggattaacggacagcccgttcggcgtttaaatcggctgcaagaagatatagcggacctaacctataagcctattaactgtgctgagagacttgtgtttttgctgcagcgagtttcttcttatcaagcgtatattcagctgacagagttatttaatgagctgcgtaagcagtatgcaaaaatgcttattcttcacaagaaataaagcccctacacgtgtaggggctttttactgctacgttaattttcagttgttggctcttgctgcggtgtagcagatgttgacggcgtcgatggtgtagcaggggttgttggtggtgtctgacttcctgagtcacttccaccgttgtctgctggaggagttgttgtgcctccgttattactgttgttgccgctgttaccatcgttagcattgccgctatcattattgttattatcggtattgccgctattgttaccgccgttattgctgccattattgttgttttggttatcatccggctgagtagatgaatcgtcaccttgatcagagccgttgttttgatcagggttgctattgtcttcattttgattatcgtccgttgttccgtcatcttcaggcttagtagaatcatcttcggtagcttgatctgatgaatcagggacttttacagaagaactagcgctttcgcccgtatttgttgttacggtgaaactatacgttgcgcctggtgctgggttggaaattgtttttccaccggctcctgcgccagatgcgagttgttcagaaccgttaggagatgacattgtgactgtaaaggtcgtatcactggctgcgtttgaagctgaccagttaactgaaattgctcctccgctatacgaagcagtaatttttggcttcacatctttattgtctttattgtcttttttctcttttttgtcctcttttttctcttctttcttttcttctttttctttcttcacaaacgtttgagatacttttgtcggtgcagtaccgcgtacaaagtattctttagtaattaagctcgaaggagtagagccgcttgggcgttttaagtctttgcccgttggtttttccacggaacgttcaactacgctgtccggctgcttgaaacttcctttaggtttgccttcagaaatatgagtaataacatgcttaaagatattttttgccatgcctgtttcattaggacttaaaatatagccatctttagcagtttcatagcctgtccatacagaaatcgtatagtttggcgtaaacccattaaaccaaacgtctttttcaccagcgtctggaatgttgtatcgttgtttttctgcagcactaaagttcgaagttcccgttttacccgcaatttctaatcctggtgtacgaacagcacgagctgtaccatatgattcgtttacaacagatttcatcatgtccgtcatcataaatgccgtgtaatcttgcattgcgcgttttgattttggtgttaaatcaatttctgttccatctgggaattttacctttgtcactgtatgaggtgcattgtacataccttcatttgcaaaagcgctataggctccagccatttgcagcggtgtaacacctgtacggaatcctccgatagaataagattcagaataagcttcgccgtcttcttcgtctaattttagcccaaggcccgtagcgaactcttttgctttgtccgcaccggttgcttgaaacgcttttaaagcagggatattcagtgaacgtcctaatgcttcacgcgctgaaacccagcctttatagtttcgtccgaagtttcggattggcgtgccgtttgaataatgatattcttcatcttttagcggttgtccagtggaccactttaagttctcaatcgctggaccgtaatctaagatcggcttaatggttgagccgggctggcgtctcatatttgttgcaaagtttaagccgcctgatacacgattacgtccgcctccaattgcttgaataccgcctgtttcattatctacaacgacaagacctgcttggaatttatcgttcgggaagttgactactttgttattcatcacatcatccacatagtcctgagcattagtgtcaagcgttgtataaatttctaagcccgcagaaaatggatccgcgtctgttttcttttttacttcttcgattacttgatcaataaatacatcgtacttagatgttgattcagtttgtttagctaagtgagcctgtacatctacttgttttgctttgtcggcctcggcttgtgtaatgaagccgtttttagccattaagtttaatactgtgttacggcgtttagtagcattctctgggtttgtaactgggttataagtagttggcgcttttggtaagcctgccaacatagcagcttcatcaagagttaaatcttttacgcttttaactccgtaaaatttctcagctgctcgttcaataccgtatacttcacctgatgcgaaatatattttgtttaaatacatttcaagaatttgttgcttggaatatttacgctcaagctggtaagctaaccacatttcttgtactttacgtttaaccgtcttctttggtgataagaacgaattctttaccacttgctgagtaatcgtgctaccgccctcagcaccgaagccgtttttaaagttcgccattaatgctccgccaattcggtaaaagtcgacgccgtgatgtttataaaaacgaacgtcttccgtagcgataaatgcgtttttgacgacttgagggatttcatcgtattgcacatatgtacgtttttgagctccaatttcttttacaactgtctttccatcgtttgcatatactttagatgaaaaagagttttttaataccgagtcatcaacttttggagcatcgcttatcatagcaaaaaaagttcccactccggcaatgagcccgatgattcctattagtaaaactgcggcaacaattttacgaaataggcctccttttttcttctttttcggttttccttgagatttaccttctggtttgttgtcattcatagctcttcgtcgttcttcacgagagcgataattatctgacataaaaactcctacctttcaacgcattgtaagagaatgatttccgtaaacatatatatcatactcttaaaagtataatttatctatagtttttatgtaatcgattctcggatggtaaccaagttcgatgaaatgtccttttttttcaatatctgccttagggattgattttcgtccatcttttttcatggcatcccaataaggaaaaaggaactgtgcttcgaacaagtatatttcttgtaaagtagagaacattaatataacgaaacaaatcccgttttgtttcacaatttgcttcatatgttcaatttgatgttcatgaaaattacgcagcggaaatgaggttttatttctcgtttcttttgcttcaaagtcaaggtgttttcctttatagactccattatagtctgtagtagaagcctgtttaaaataagcttccttaataacagcggcacttctcttcggatagtctacttttacaatttgaacaggggttggttttttgtgaacaatggctattccttttgaaacatagtattcgtttgtttcgtttaaatcgtcctccagcgtcataccacgattgctatagctagcttctagctttttaggggaaggactgctggtattcaatggcttataggcctttccgttaggatagcgaatcataaccatcactcctttagtgtaaatctattaaacaaacaaattctattataccaaatcctacaaataaaaatagatgaaagaagatgaagagatgtcactcaatagttcggaacaagcgctgttgacggcgattaaaaaaaccacagacaagctgaatattgataatatatcaagaacccaggcttatgcaactttttatcatagatatcctgaagtaaagtgggcatttctcgcaagtatggtgtcacgaaacgcaggatggaatatgtgtgatttgcaagggaaaaacatgaaaaaagcgttatcaaagcaaacgcgcgatttattatttttgacgtatgaaagagcaaattggcttatttttaaagatgtcttcccgcaattactattgtatgctgtttcgcgtaaaaaacatgtctcttacgttcatttacttccctatttaaatgtttcatcttttatcgaagagcagtggagacaatttatgcagagaccttgtgaactgcagcttattcatgcgttaattgtgaatgagcagcatgttattcaacagcccgttattgaacagcctttttatcaagatagagtgtttaaaactacgctgtttttttttcaagatatattccactttagttccgtcctttttcctactacaaaaggggagctatacggttgttctgttcatgattttacaaaagtaaataatcggattgatttgggaaagaaattagcggctttattatttcatgaaaagtattatcccttgttttatgaattttctttgaaaacaaagcatacgggttcgagatacgattatgagcagtattttgtgaatgaaatcagttgctgtacacctgctcttcgaaaggtgtatccggctattagacatcatgaaaggaagagagaaaagtggtttttaacgaaaaaagaggagcaaaagcttatgaaaaagccgtcttttccaaagaaagttcattttacaaagtggtatcttcaaaagcaaaagcagctgtatatattaatgaaagtagcgcaagtatttaatgtaaataaaaacggtcacaagtgaccgttttgttcttaagtagaaggctggttaggaccgtttaactttttaggatcaccgtaggtttttgtttcaggcttatttttaggctgtgatttttgctgtttgttggccatatctaggcacctcctatcatgttgtaataaacgttcagcagcggaatgtatctgcttagctgaaatgtctatactagtgttttcaatatgttcactttcgattcaccataaacgaaaatgtcgaaaacatctttctttgacgaatagaaactagttttgtcatgtgtgaagggacaatgaagaaaagagagaatacgttatgcaaaggaaaatttggagggatggcgatgaaacaaagtatggttaaaacaagcgaaatgatgactttattagatagcttactagagcaagtagatttagtggataaaacgatgtctacatctataaatgaagcatttacacattgtgaagaaacatatatggaacaagttcatcgcattgaccaatcactgcaagaaattgaagtagctgtgtatgaaagcatgccttccgaaacagaatggaatagaagccgaagagaaatggttcttcatacagtataaagactgtttatgttacaatagtcatcgtagaggtgacgaataacgatgaatgaagatgtgaaaaaaagtacggagatcatgtttcaatataatgaagtagctgtagaacgattagcgtctattcaacaggaagaaaattatgaagtgaaattttttgaagaagtaaagccttatggagatattttcttcaaagaacttgatgaatgggctagtctcgtaacggaatggctgaagaaagagcgaccaaaatatattcatgttaatcaaatagagacgttaaaagaaaatttacaaaacgttgtactacagtcgttttatcccgagacgcgagaaaagcgatttaaaaagatgtatcactcaaataagtatgtgctcgagtcgatattgaataattaatcccggccttccgttgagacttataaggtggggattttctatgtatgagattgtgacaaaagtattttacacgaaatgaaaaacgaactatcgatcaaaacttttgattcgtagttcgttttttttgatgagaagcataggtttcatttgttttgttccttctagcagttgattggagatcaactgcggtgtcataagcggttcagctcatgtatcccatttgttcgtctcaagattggcttcattttgttatgtcccagcctctttttatcatatcaatcaaagtctttttgagattggatagaaacagctgggtgatcttgtgaagcgactgtatcgatatgataatcaactttttcagtatgtttagaagcaacggcgttatttgttttagttgctgcactttggccttgctttttatgatcaaaatgttttccacgactcatgagatagacctcctttattgaatactacgttaaagcttttatagtataaacaagtcaaaaaagaagtatgtgtccactttataggaaacaaagaaaccaccgatttctcggtggtagtaaaaaaattaatcatcttgtgcactaaaatcgggcttagtagctccaatttgttcgagttcacgtacagcggctttgtaattcataggagttaaaaaaaccttttaaatactgctgctgagcaaaatcgagtaattcattacttgactgcggctcatactgtttcaccgcaataaaagcttcttgaagttcgttcacatacatgtaaattccctcctaatccccatttgtgccactacgtatcgtagtatcacttgttcttatcgtaccatatatttaaataatctcgtttttttgaaaaatttaaactttcgacagaaacctacatatttttgaatgtgttttccaaaagtacaagtagacgaacgtcacctcttatttctgcatacatactatatattatgtaatattaaaaaggaggtattgattttgcatgtatacaagtaagcattatccgtattatgagcaacatcaaccagaacgttttgatttaagtcaggtacatccatttccgcagtatcatcagcagccatggacggaagcttatatgccgcaacatccgtacgctcagcaacaaatgccttttgggcctcagcaaattccctacatgaacggaatgtaccagcagcccatgtacaataatgcaggtgcgccttttaatccataccctaaagctcagcaacaaaagcctcagccttctcaatttcagtcattaatgtctcagtttaaatcgagtgatggcaattacgatatgaacaagatgatgaatactgcggggcagatgatgggagccatgaaccaattaacatccctagttaaagggttttccgggattttcaaagtataaggactagaaggtgttttctagtccctgcttattattttttcttttgatttttcaaataggtttctccaagaagtgtaaatacttcattgtaagttaatccagactgagcatttaaacgtttgacttcttcgacatctgttgttgatgaagttgaaatttgatgcttgctttttttcataaaacctctccttctctatgtaaaatgaataacatcccatcttagtatatttccaaatgtgccctactataagtggaaaaaaacgccgaagacactcatggttcttcggcttttttttgcaataaagatgagtgtttagagaaattaagagcggcgtgaacgacgagtagaacgacgtgaacgacgagtagaacgacgtgaacgacgagtagaacgacgtgaacgacgagtagaacgacgtgaacgacgagtagaacgacgagaacggcgagtagaacgacgagaacggcgagtagaacgacgagagcggcgagaagaacgacgagagcggcgagaagaacgacgagagcggcgagaagaacgacgagagcggcgagaagaacgacgagagcggcgagaagaacgacgagagcggcgagaagaacgacgagagcggcgagaagaacgacgagtagaacgacgagaagaacgacgagtagaacgacgagagcggccagtgctacgagaagagcgacgcggctttgttagtggaccggcagttggctcttgaaacataaaagatttcagttctgtacattccagggcttcagcagcctctttaattttttcaggtgtaatatgcaatacaaaaacctccttgtcaattggactaggtcttgcattaatagaatacgcactgatgcttgtccttgatatgagtcaaaagtggagtttgcgcaaatagttgatgcggtggggtatcatggagaatttacccttcatatactttaataattgaagaaaggtggtcgaataatgaagcaaaaagaaatccctcaatacgctctgtttgtgaatgtaaaagatttaaaggaaatgcaaagagatatttggtcagaagaagcgattcaggcaacgatgaagtttaacaaaaaacgctacgatattgatttgctgctaagaggctcccacattcggaagatgaaaaaaaagtcatattatattgaattttattctccaaaaatatttcagcgagccaaagaaatacacctaaacgctgaatacaaagatccatcgcttatgcgcaacaaattgtccctcgattttttctcttctctggacgttttatctccgcattctcagtttgtcacccttaagattaatgggaaaaatgaaggaatatatcttcagctcgaatcggtagacgaactatttttgaaaaaaagaaatttagcggatggatccatattttatgcagtggacggagatgcgaatttttctttaatgagcgatttggataaaaggccgaaaacaactttgttatctggatatgaagataaagcagtaagagaaggggatgaggaaaaattagaaaagtttatatttaatcttaatacgtggacaaatacggaattcgaacagaatattgagaagtacctgaacgtcgaccgctacttatcttggttagtcggtattatttgtatgcagaattacgacggttttgtccataactatgctctctatctaaatcatgaaagcgggcgctttgaactgatcccatgggattatgatgcaacatggggaagggatgtaaatggaaaagtaatggaaggagactatgtccgcgcacaaggatttaatacgcttacagctcgcttactggccgtgaacagcattaaaaagcaatatattcaaaaaatgaacaatgttctaaataatcaatttacaatagaatacatgaaaccaatcatttatcaactgcatgagtatattgctccttatgtattaaaagatccttacgtaaaagataacttggaacaattttacaaagaaccggaatttatgctgtcttttataaaagaacgaacagcgtatattgaaaataaccttttgactctttaaaaagagatagatttataggcaatttataggcaacagtggattttgttaataataggcaaatgcaggaaatcaatagctgtacatgatacgtatatatacagtatgaatgaccaataaggataactaataaggaggaaaaacaatgagtaactattactatggccaagaacaagggcaaaatcaaaatccgcgccaaaaatcaagcgaaaaatcaagccaaaaacgcagccgaaatatacaaatgcctgataaaggctattcttctcacttcaaacccctaaaaggaagagtggtgaccgtttatcgtggaggacctgaatctaaaacaggttatttagttgacgtgcaatcagattatttaatcttagcagtggaaagcaacaataacaataataacaataatggtgaaaataacaaccaaaacaaccaaaacaaccaaaataaccaaaataataatcaacaagaatatacacttgtatattatcacttagcccatgtaaaaagtatcactgaagatactatgtcaaattcggcacaaacgtttactggaattagcgcagaattagaattatatcgaggaaaaacttttgctacaactttatcattgatgaaaactaaatatgtgcaggttaaccaaggtggacctgagaaaaaagcaggtcagcttcttgatgtcttaggttcatttgaatctgcttatatagtattactcacagaggacgacggtgtcatctatattaatactgaacacgttaagagtgtgagtgaatatcaaaacaacaatggaaatcaaactagtcaatctgcaaatgaactcttagtgagccaagaaccagaatatatgaaatccaaaagttttaacgatctttttgcccacctttctcataaatgggtatcaatcaataatggaggacctgaagctgtagagggcgtgttagtacaaagccgaaatggtacatttacacttgtgcagaataatcaagtattacgcttacagccaagacacgttaaaaccatttgtgtaggagcaaaaggggcttttaagcaaaacgataacaatcaaaataatgaagaaacagaagaaaatggagagactgaagctgcgaagtctacagaagaacgcacaggcggacgtacgggaagccgcacaggtggacgtacaggacgccgcacgggtggacgcacagacgatcgttctcgaggacgccgcacaggtgatcgctcgggaggacgccgtacgggttcacgctcttcagcaccggccgagaaagttattaaaacgaaaaattatcgttggaaagcatgatgaaatggaacataaaaggtgcttataaagcaccttttctatcatataggaaaaaggaggagaatgagaatgagtatgaatcattatatcaataaaattgtagagttagatatttcaggtaaaacgacatttgttggcagacttattgatcttggattagatattatggttttgtataatggacatgattatttgtatattcctcttttacacatgcatcgtttgcgggaagtatcagaagaagactatacggttttacgtgaaatagaagagaacttaatagaagaaagtcagcggatttcttatcgtaatattttacagcaggcaaaagggaaatttattgaaatttatgtaacgggaggaaaatcattgcatggctatattacaagcgtgctgaatgattatcttgtgttttattctccagtgtataaaaatgtctttgtttctctgcatcatttgaaatggcttaccccttacagtaatgagttaaccccttattctttaagtgacaaagagctcccagtaagacctgcctctgcaccttttgtcagaaactttgaagagcagcttaaaaaatatgaaaatcaactggttgtattagatttaggggatcaatcagaaaaaattggcgtacttaaagaagtttctaataatattgttgaactaattacggcaaatggagaaagtatgtattggaagttagctcacgtaaaatctgtacacttgccttagaaaaagagacctcgctttcgtctctttttttatgtgcttatcaggacaagtatattgaataaacaaatgagacgatttaaattttttagaaaattatgttgacaatacagaaaatctttattaaagttattaacaacaaacgttaatcaccaacaattatatagaactcttatccagagtggcggagggactggccctgcgatgcccggcaaccatcaaatgaaacattcatttgaacggtgctaattcctgtggaacatcagtattgttctaacagatgagagaaatcgtgtataaacgaacactcttccatctgtgaagagtgttttttattttgagttaaggagagaaatagatgaaaattgaaacattattagttcgttcaggagtaggccgtgacccttcaacaggttctattacaacacccatttaccaagcatcaacatttgctcatcctgctttagggcaaagtacaggatttgactatgcacgtacggcaaatcctactcgtacagcattggaagaagcaattgctgctttggaaaaaggagaagtaggagtagcattcgcttcaggaatggcgggtgtaatggcagttttagcactatttaaaaacggagatcatttaattgtatcagaggatttatacggaggaacgtaccgagtactaaatgaaattttttcagagcaaggaattactgtttcgtacgtcaacacagcccatctcgaacaagtaaaagatgcgcttcgtcccaatacgaaagctttatttattgaaacacctacgaatccaatgatgcacgtgactgatttgccagaagcaattgcgttagctaaacagcatgatttgcttactatcgttgacaataccttcatgtccccttattatcagcgtcctttagagcttggagcagatattgtgatacatagtgcaagcaaatacattgggggtcataatgatgtagttgctggtcttgtagtggctcgatgtagtagcttaggagagaaaattcgtttttatcaaaatgcagctggggcaatcttaggtccacaggatagctggctgttattacgcggtgttaaaacgctagcgcttcgtatggaaaagcataatgaaaatgcactgaaaattgcaaattggcttactgctcatgatctcgtggaaaaagtgtattaccctggtcttgaaacacatccaggctatgaaatcatgaagaaacaagcaactggatttggaggcatgatttcttttgctgtctcacaccctgacatcgtttcagtacttttagaaaatgtcaaagttattacatttgcagaaagcttagggggcgtggaaagtttaatgacattcccagctcgtcaaacacatgctgatattccggaagaaattcgaaatcgtgtcggagtaacaaactgtttactgcgattatcagttggaattgagcacgcagatgatttaattaaagatttgaaggaggcatttgatgcataccaacaataataaatatagatttggtacgaacttaattcatgcaaatacaggaattgacggtcattttggagcggttaacgtacctatttatcaggtatctacatttaaccaagaagatgagacgaacaacggccgctatgactattctcgttcaggaaatccaactcgtgaggctttagaaaacagcattgctcagctagaaaatggatacgctggttttgctttttcatcaggtatggctgctatctcatcggtgttatctatttttgaatcaggggatgaaattttagtttcacatgatacgtacggcgggacatatcgtgtattaacacggttattttcaaagtttggtatcaaaacaacttttgttgatacaacgaaggttgagaaagtagaagaagctatcacaaaagatacgaaggctatttatatcgaaagcccttcaaatccatttttacaggtaacggatattaaagcagtagcaagtttggcgaaggagcgcaacctccttacaattgtggataacacgtttttaacaccttatctacagcagccgattgaccttggcgtaaatattgtgattcatagtgctacaaaatatatcagcggtcacagtgacgtcattggcggtctagttgtggtaagcgatgaaaagctagcagaagaagtaaagtttgtacaaaatgcttttggtgctatcttaggaccgcaggattgttttttactgcttcgaggaattaagacattaaaagttcgtttagatcagcagttaaaaacagcgctgcagtttgcaaagtggcttgaagaacaatctctagtgagccgtgtatactacccgggtttaaaaagtcatccagaccacaaactgatttcagaacaagcaaatggatatggagctatgatttctttccaagtacaggatgaaaaagtagcgcgacatattttacaaggagtcaaattggcttcaattggtgttagtctaggtgcagttgagtccattctaacgcatcctgcaacaatgtctcatgcgagtatcccaaaagaagtgcgtgaagaaaaaggaattactgattcacttcttcgcctttcagtagggttagaggaattcgaggatttgaagcaagactttaacgctgtttttcaaagcttagaagaaaaggcgttaattaaataaagaaaagagactgggacaaaagtattctagttaaagttaaacaagaactattaatcaaaattactgattaatagttcttgttttttgttgtcacggtgaacgtaggtttcatctatttcgttgcttctagcggttgattggagggcaaggcgaagactcctgcgggaaaagcggaaggggtgagaccccgcaggagcacaagcgacgaggaggctcatcggccgcccgcggaaagcgaagtcttgcacggaaatcaaccgcggtgtcacaagccgttcagctcctttatcccatttgttcgtctttacactgggttgatatccgttatatacagctatctaaaaggtttgtgtatagggacgtaagcgcaactttttcatcagaggaaagactgctgtttagaattctttttatgccaagatgatattttacatacggtgtttgccggacgcgtggatgagtcatttcatcttttaaatccttcataatggcttcgtgaagctgatcttcacttgtcatggcttgtttagaagcgaacgaacggttcaaccatagggtttgataagctgctagtaaatgttcagaagtcattgtgcaaagagctcctttaaattagtttcttcattataataatctatagtttaccataagtattaatacgtgtacgtaacttttacagaagcagatacagtcaaggactgagcttgaatagggggagaggctgctaataacttaggcgaggagccagatgactgatagacggggccttcttcgattaaaatggggatttggttaatagggagctgcagcgtgttggcaatggtaaaggccttttctttagcgttaagcaaagctttacttatcgcttcttgttcatatttatcatcatttgtaacgtggaattgaagatcttgcgctacgttggctccgcttgaaaaagtagcgttatagacatcgccagcttgttttacatcttgtactcttactctaaataagtgctgtacttcgtatcctgtaagagtcgattttccatcactgtaatcatatttagggtttatggtaaacgaagctgtttcaatttgctggtcattgattccaagtttttttatctcttgcagcaaagtatttgaaacagctgaattttcttttaaggcttcttgaacgtctcggttttccgtgtgggttccaatcgtcatggaaatttcattgggaactgctgaaacacttccttccccaattactttaatttctctattttgtgtatctacgcgcagttgctgtgtaggttcataagggaaataagaatgttgcataccaaaaacctcctttattgatctttagtatatatatgataagaaaaggagattaaaaacaaaaagagattgagacataactaaatcaaccgctagaagcacctacatacatgaaacctacatccaccataccaataaaaaaatccgaacgaatttgattcttcatcaagaatcaaattcgttcggatcttccttcaactaacatacttttcttcagcttctttttgtttatttcgattcttttattaagatttctttcatttcaatgaattgattttgaacatcgtttgacggtttctttgttagtaaacttacaataataacagctaataagcttaaaaagaacccaggaatcatttcgtaaagggcatccttcaatggagtatttacccaaattaatactgtagcagcacctacaatcatccctgcaagtgctccccatcgagtcatacgcttccagtaaagacttagtaaaatagcaggaccaaaagctgaaccaaatccagcccaagcatatccaaccagccctaaaatcgtatcactaggttttaaagaaagcaaaatgccaataattgcaacacctaaaaccgcagctcttccaaccgtcacaagctctttgtcagaggccttgcgtcggaaaaatgttttataaaagtcttctgtaacagagcttgccgttacaagcagctgagaagaaatggtactcataattgccgctagtaaagctgcatataagaatccagtaattaatggattgaagagtatatccgcaaatttaataaaaatagtttcaggatctgctagtttcatacctgttttttctacatatgcaatcccaacaagtcctgtcagcatagcaccaataatagaaataatcatccagctcattccaatacgacgtgcgggttttaactccttaacagaagagatagccataaagcgaacgataatatgaggctgcccgaaatagccaagtccccaggctaagaaagatataatacctaaaacggtcgtacctttaaaaatgtcaagatatgctggattaatgtcctgtacaatatctattgttgtgttaacgcctccaacattggtgaaagctacaataggtactaaaactaaggcaagaaacataataacaccttgaacaaaatctgttaaactaacagctaaaaatccgccgaaaagggtgtaggcaataacaacagatgctgttacaaataagccaatttgataattcacaccaaatgccgattcgaacaatcgtccgcctgataccataccagctgaagtgtaaagagtgaagaaaataaagataacaatcgctgatactgttcgaagaatcttggcatggtcgccaaagcggttttcaaaaaagtctggaattgtaatggagtcattcgctacttccgtataagtgcgaagacgcggagcgaggattaaataatttaaataagcaccaatagataaacctactgcaagccataaacttgaaagacctgtcacatacatggatcctggaagccccattaacatccatccactcatatctgaagcgccagctgaaagcgcagtaacggccggacctagtccgcgtccgcctagcatgtaacccgatacgtcttgagttgtttttgtgtaggcataccatcctattccaagcattcctacaaaataaatgcccagtgaaatataaacaccaatatccaccaaatctcccctttatgcattttttatgcacgaaacgagcactgctcgccatgcaaacatcttatggtttctaaaactaacaaacttttcccttactatcaacccacaaaaccgtaaattacctaagtctaaaatcccctaaacctttatattatagagatgaaaacgttttcaaaataaagtaaaataaaaatattcagaaatttacaagcgcattttttatgcaatattttatgcaataggtaaaatgaaaagagcattttataaaatgctcttttgacattcatgtatattagcgtgagttcgggaatacgcggcgaacaacttctgaaaactcgtcaaacagtccagagactggtttgccggtttgaagcttgtctacatatccgttcatacggtttacaaagtcagggtttgttgatacaaacactcgatgaacactgccgtcagcttttctcacttcatgtgcgatcttatgctccatatcttttgtgagattaccttctttgttatcgtctaatacagctgctacgtaagctgtatgatcggttacgattacgttagcatctttaacgttttttaacgctacgatacgatcagcagccacatcggctactctcattccgcccgactggttatattgttctttttcgttacgctgtacatcttgcgtatcgtttacgtcattcattttcgttttattgtttccattttcatatgtgacgttgcggactgtatcatcatcaatgacgccatctttaccttgatctgctgtgctgcagccgaataaagaaagggtggtcatgcagcctacaacaaacaaaaacgatttcttcatgatagtatcactccttataagttttaacctttcttataatttgttaaaaacgtgtgaagcatacatgaaaaatataaaaaagcctatactatcgaaaaaggaggaatatgtatgagtggaattcaacaaagcatatttgtgcttcatacaaaagaagaaaaccatgaagaaacaacaacgtttgccctaacttcagaagaagctaagttattatttgagaccctgcaaaataaacgaaaagaaattatcgatgcccatattgataacatgttgacgtaaggaagatcaatattttgcaaaacggctgagccatatgctaagaatggcccaatatttgcattctacatataggtatagtataatgtaaacgcaaccaaatttaataaatgtaatgaatactacgcttgaccatacactcgaattagatttagtgaaaattcacttgttataaaggagatctacttcgcgtaggtctcttttataatatgtgaattttttatttacggtataaatgtaaatatagattaacatattaaaatttttacattttcggaggttttttacatggctactacaggtacagtaaaatggtttaacagtgaaaagggcttcggttttatcgaagtaccaggcgaaaatgacgtattcgttcatttttcagctatccaatctgaaggcttcaaaacattagaagaaggccaaaaagttgaatttgaaatcgttgaaggtcaacgtggacctcaagcggagaatgttgtaaaattataattcaacgctacatatgaaagctgccgataggcagctttttttatacaaatttgttttatttgtatgattaagaaaatagattaaagtaggggagaagggaaggcatgagttcatttcattgctgtgccacatgtgaacattttcgaagcattaaattggataagggaatgaagtatcgatgcaaaagactaggctatgaaacccgtccttcttatcagtttacatgctgggagccaaaagaagtagttaaaaagctaatggaaaaacgaaatcaaaaatgaggattggacataacgcaatcaattcaatctacagacgaacaaatgagataaatgagctagtagggatcgttttttacacaacagctagaagcagttacatacataaaacctatgttcactctaccaatgaaaaaatccgaacgagtttgattctccaccaagaatctcgattcatcgttcggattttccttcaactaaaatacgtttgtcccagtctcttttaattattcctcgttatttgtaccttcctctgaaggtaagtgcttcccgcaaaactcttttacagcttcttcttcctcttcttcaaggtcgaagtctaatactttatttgttgaaacttcgtaaaaatgagtttgggcaatagaagtgttatcttcgcctttaatatatactaagcgtagtgctaggtcgttgcccgtatataattcatcatcttcttctacctcaatgtataaatgaaattcatagcgttcacctagaaggagaccaaatggatcctgcaattgttcagctgtatattctttaattgtaaacatatgtacgtcctttccatatatcagtaaaatgcttgcatcatctattatagtttttctttgcaaagaaagaaagtgcaggcgtaattcatgcacgaatttattccttgatcattctatttagcgaatcgatggcgcaaggacttcgatgatttacttaaaggcggaagaaacgcgcgtatgtttttgcttatacatggcagcatctgctttttgaattaatgtatctaggttggcgtcgtctgaaggcgcacatataataaatccgtaactcgcagacagtgcatatgccttattaaattctttctttttattttctagctgttcattaatattttgccacagcttttgtacgtattcttccgtttgttcaggagccattaataaaaactcatcgcctccgtaccgaaagagcgtatcatctttgctaatataaccactaattgattctgcaattgttttaataacccagtcgccttctctatgaccgtattgatcatttactagttttaaagaattaatatcgataaaacataatagaaaaggtgtatcattggttttagctctcagcagttccagctgcagtttttccattccgcttcttcgatttaaaattcccgttagcatatcagttgaagcgtgcaagctcaattcatgctctactgcttttaaatcggttatatcggtaatacctgcgagtatgcagctttcgctttgatactctagtaattcataattgatcataacccacttagaatctccatgttcacgtgcttctaggatgtagttttttacatatttctcttgttgaagacgttttaaaatatcctctcgatcttcatcggtaggatagattataaacccgtctatttgatcaagatcttgagaagcaagattgtaaaaatgaatagctttattgttaatgagcagcactttgtggtcggataatctcgttaatagtaaaggatagggattaattttgaacagcgtaaaaaaattacgttcgctttcttttagctgtaaatgattcatatattctttgtgacggtatgtataaagaatgtatgaaataagtaaagcgatagcaactgctgcagttgtattgatctgctttgaaataagagaaaaagaatctggtacatatcgtgataagccgtatagtaaaaaaagatggttaggaataaaaatgatgcacagatgttttaatttcataggacataaaacagctgtggaaatcaaaagcatcatatacacgtctacgcgacctgtgaaaagctgactgttaatagtagaaagggctgcagcaaatacgtaataaaatatatagccatatacaatggtgcttaagtagttagcaaaccgttcttttctcttactaacataatagaaaaataaataaagagaggagatagcaaaactagtgaaatgaataccaattagtgtatgtctaaactgagatgtccccgcatgttgaagtaaagaaaaccctatataaatataaataggataggaaactacaagagcaagtgaaactagcttgactctctgttgaagcatctctgcattcgttttatcgaacattttatctttattaacttctcttccggaaggaaaacgatatttcttcagaaaggagaaaggtaaaagcgaaagaagaaatgacatgaccatcatctccatatctttttttaggtattttagcatgtttatataagaaaagacatgaattttttagatgagaatgtctgctttttgatcaagaaaaagcataaagatttacatgattaaaggtgaggccaaagagcctcacctttttattgaagtttattggattcagcatgccgtacaaacatggtctcatcttctactaagccgcaagctccgcactgaatacgtttctgcggtccgttataagcagcgtgaaaggcatcgagcgtatcgtttgtgtattcttctacgacgtctccgcttcttgggtccatttttacaggttttgcattttgttcaatgatattaaagcgcgttcgatttgttttgcagctagggcaaagataagggcttcccatttttaacatctccttgaaaaatttactgtattaataccatgtccgaatcccccaaaaacatacaaaaacttatggttttctatcgaacgttcattcgttaaaatagaagcaggtgatgaaaatgagaatacgaaaaaacttacaagaagtaatggatatcttacaaacgaatccgtcatatcagaaaaatattgttcattggcatacaatcgaagagaaagaagctaaaactgcgccatttccggcttctttgcatacgaaactgcggcaagcacttgagaaccgaggaattggttcgctttatacgcatcaaaaaacagcgtttgatttggcgacatctaagaagaatgttgtggctgtgacgccgacagcatcggggaaaacattgtgctacaacttgccggtactccaaagtattatggagaatgatcaggctagagctctttatttgtttccaacaaaagcgcttgcccaagatcaaaaaagtgaattaaatgaaatcattgaagaaatggaagtaccaatcaatagctacacgtatgatggagatactccggcaaatatccgtcaaaaggtaagaaaagcaggtcatattgttattacgaatccagatatgcttcattcagctattttacctcatcatactaaatgggtatcactgtttgaaaacctgaagtacattgtgattgatgaacttcatacgtaccgcggtgtttttggaagccacgtagccaacgttatacgcaggttaaagcgaatttgccgctactatggaagcaatcctatctttatttgtacatcagcgaccatcgctaacccaaaagaactcgctgaacatttaacgggagctcatgttatgttagtagataacaacggagcgcctagcggccgcaagcattttattttttataacccgcctattgttaataaaccgttaaacattagaagaagtgctacgcttgaagtgcgaaatattgcaggagagtttttgaaaaataaaattcaaacgattgtatttgcacgaagccgagtacgagtggaaattattttaacgtatctgcaggagctcgtaaaaaaccagcttcaaaataagtctattcaagggtaccgcggaggatatttgccgaagcagcgacgcgaaatagaaagaggacttcgagagggaagtatttacggggtagtcagtacgaatgctttagagctaggagtagatatcgggcagctgcaggtgtgtgtgatgacaggttatccaggcacggttgcaagcgcttggcagcaagcaggacgagcagggagacgtcacggagaagccgtcattgtgatggtcgcaagttcaagtccgcttgatcagtatatgattcagcatccggactacttttttagcagaaacccagaaacagctcgaattaatcctgataatcttgttattttagtcgatcatttaaaatgtgcgtcctatgagctgccgtttaagcagggagaaacatttgagggggtagaaattgaagacgtgctggagtttttgcaagaagagcgagtgattcattttagcggagacaaatggtactggatgaacgattcgttcccagctcataatatcagtctgcgttctgcatcccaagaaaatgttgtcattattgatcaatcggacgttgcaaatgtgaaagtaattggagaaatggatcggtttagtgccatgacgcttcttcatgatgaggcgatttacttgcatcaaggcattcagtatcaagtagaatacttggactgggatgagaaaaaagcgtatgttcgtgaagtcgatgtagactatttcaccgatgcaaacttagcagttaacttaaaggtgctagaagctgataaagaacggatggagagaacatattcaattggttatggcgatgtaatggtcagcgctatggctacgatatttaaaaaaataaagtttgagacgcatgaaaacatagggtcaggtcccatttcacttccagaagaagagcttcatacaaatgccgtgtggctaagctttgaaaaagaacagttttacgaatctgaagaacgattggaacaagcgctcatttccgtggcaaatgcccttcagtcaattgcaccgcttatggtgatgtgcgatccgtctgatttacatgtagtgccccaggtaaaagcggtgcacaacgaacagccgactatcttcttatatgatcgatacccgggaggcattgggctaagtgacaaagtgtacgaacaaatgaatgatgtgctaagtcaaaccaatcaattaattgtaaattgttcttgcgaaagcggctgtccgtcttgtatcggtatggaagcacagggagaacacgcaaaaagcgatgcgctcgtgctgctacaacaactgcaaagtaggtgaactcttgtcttttaaaaataaattaaaccgtatgaaaaagcatcttcacgttacagaagcaaagccgccggttgaaagtaacccgcagcaacctaaaagcgcgtctattccctatgagcaggaatggaagggaaatcatgctgttccttactttgcggaagacagctactgtatgataagagaggtggtttacccgctcgactacaagcatggacattatgaatttaatgagctgaaaaaagtagtggaagtatggaatgggtctacagttgctcatccgctttcatcaaaaggccgcacatattcagatttatttttctttgatacggaaacgacggggcttagtacaggtacgggaacaactatctttttgctaggatatgcaagggtgctaaaagattccgtcgtttttcgtcaacatatattaacagagccaagcggagaagtagcattttacgaaagtttcttaaaagaagtagactatacgacgcttgtgacttataatgggaaatctttcgattggcctcatgtgaagactcgtcatacactattgagagatcatttgcccaaactgcctaagttcggtcactttgatttactgcatgcatcaagaaggctgtggaaacacaaaatgaattcggttaagcttgcgaatgtcgaaaaagaaatacttggaattgaacgagttgatgatattccaggtttcttagctcccatgatttattttgattttattgaaacgaaaaatccaagaggcttattcgacattatgaaacataatgaacatgatattttatcacttatcaccttatacattcatttatcaaaacatctccttactagtgaggagtttacagaaaaagaaacatatgaagtagcaaggtggtatgagcagttaggggagaataagcacgctttctctctttatcagggcgtagcggaaaaagaaaaagaagagcatgaaaaagctcagctagcgatggcttatcattataaaaaagagaagagctggaaagaggcagtggacatgtttgaacccttggttcaaacatgtgaaggtgacgtcgctatagaagcattggttgagctagctaaaatttgtgagcatcgtctcaaagatgtgcatcaagcacttctatatactgagctcgccttggaaaagtggaatcaactcagagaaatgactaaaaaaacgtcgaaggaagcgcttgaaaaaagacttcttagactaaaaaataaatcagctaaagcatagacttcagctgatttattttaaaatattcagaattattattctttcgtttttgtggatgttttatattgttctatttttcagtcattgataaaattagtcaatgtaagacttattcttacagcttaaaaacagaactttggtgagatggagagaggcctcatgaaaaatgtgattttagtatcatttttcgcattaatttgtttaacagtaattgtcttaagcagtttgaaaaattcgtataactcctttatgtaggccaaaaataggtgtttgtcttagtacatgtacactacccttcacatattgtaatagtgtaataactaaacagtgaaaggggaaaaaggatatgtatccaagaccaacaaaatgtatgccaccaattgtgcatccaacaaaatgttgcacgcagtttacttctcaggaggtagttgtacctcacattcatccaagtcataatacattggtgaatcatacaaatgtgaagcacgtacattacttcccgcaaacgcaatctgttgtaaatgaaacttcaaatcaacagttttttggcggtgcgcagcaatatccaactcaagtagggggagcaggctatccaggtcaaatgggaggctacccaggtcaagtagcaggtgctggttacccaggtcaaggaggttacccaggtcaagtagcaggtgctagttatccaggtcaaggaggctacccaggtcaagtagggggagctggttatccaggtcaaggaggctacccaggtcaagtagcaggtgctagttatccgggacacaaaggttgcggccaaggaagctgtcatacaaaaggcgcgcatcaaggacctaattcagggtattttagataatgtacgttaataggagctgattacatcagttcctattctattttgttacaaaggagttatataatgaaggtgctgacggttactggttataagccattcgaacttgggatttttaatgaaaaacatcaaggcattacatacataaaaaaagcgctctataaaaaattacaggaattagtagaagatggattagaatgggtattgattagtggccagctaggagtagagatttgggcagcggaagtggtatttgatctccagctggattatcccgagcttcagttagctgttttaacaccatttttggagcaagaagaaaaatggaatgaagccaataaagaattgtatgaattcgtcttaagtcaagcagattatgtagatagcatcacaaaaaagaaatatgaaagtccagcacagtttcggttaaaaaatcagtttttagtagaaaaaagtgaaggtatttgtttagtttacgacgaagagcacgaaggaagtcctaaatatatgttagaaacggctaaaaaacgtgctgaacgagaagaataccctattataatggtgacgtctcacgacttacaggatatcgtggatgaagaaaaattttcgtctttttaacgccatttggtgaaacattttaaaagataaattgacatttgaagctatttttgaaaaaatgaattataataaagataaggtttatcgtattcgaggtgatagagatgttagctgataaaattcgtttaacggccaaagaaattttagaaaaagaatttaaaacaggcatgagaggctataatcaagaagaagtagataagtatctagattctgttattaaagattatgaagcatttcatgaagaaattgaagcattacaaactgaaaatttacgcttaaaaaagcaagtagaagagttatctaaaaagccgcaacaaccttcgtttaccccgccgccggctcaacagcagcagcaagcgggtacgacaaactttgatattttaaaacgtttgtcgaacttagaaaaacatgtgtttggaagtaaattatacgaataacctaaaaataggagttgcattcaactcctatttttattatactaaggaaagtcgttatcaataacgttcgggtaattgctgcatcacatatgaggatgtagaggaaagtccatgctcgcacagactgcgatgtctgtagtgttcgtgcctagcgaagtcataagctagggtagctgttaaaagctaacggcggggaaaaagcctaagtctttttaagatatggcttgactactctgaaagtgccacagtgacgaagtcttatcagaaatggtaagagtggaacgaggtaaacccctcgagcgagaaacccaaataatggtaggggaactttctggaaggaactgaacggaaggaaggacaaaatggttacattttgtagatagataattgccaccggagtacgaggtagctagccgcttgcagtacaatggtacaaaacatggcttacagaacgttattgaaaagcaatcgacacttgttgttatacactatactttaatccaacccagctcttcgtataatggaagagctttttttatgtcaaaatgacagcttatcataagctgtcatttttttgtacaatcagactgagcttgttgtcagcctcaggtcttaggagaaaataaagctctagctcgttttgaaaaaacgtcataatccttaaactaagtatatagataagcgaaaggaggagacaaaatgcaaaaagttggtttgtttttgattggagcggtagctgctatcgttctttttgcaaatgccggtccgatggtagggcttgcacttggcttggttattttgtacgtagcatttaaagggtttgttaaagcagagaccccctttaaaaaatggctctgggggtttattggtgttgtcgtactcttaacaaccgtttcaaaccttccggcccttgcaggtatcatcgcagcagtcgtactttatattgtatataaaaagtggaacagcagcagctctataaaaacggaaaaagaagatccgtttaagcactttgaacgtcagtgggctgacttaaatcaaaaataataaaatttcactttattatctaaggagatgaacaaaatgagaaacttatttactcgaatgaaagaaacgatttctgcagaccttcatcaattacttgatcacaaagaacaaaaaaatccaattgctgcactaaaccactatttgcgtcaatgcgagcaggagaccgaaaaggtaaggcagcttgttgagcgacagcacacgttaaaagaacagtttaatcgcgaatatcatctggcccttgatatgatgaaaaagcgccatgagcaagcacaagtagcacaagcagctgaagaagcggaattacatgaatttattttaaaagaacatgctcactacgaagagagagcaaagcgcgtaaaagaatcttatgaagatgcatccaagcagttagaagagcttgaacaaaagtatgaagaaatgaagcataaggtaaaagatatgcatattcgccgtatggaactaatggggcgcgaaaatattgctcgtgcgcatcatcgtatgaattcagtaatgaaaacagaagcatcttatacgtcttacagccagtttgacgaaatggaaacctatattgaccagcttgaaaatcaaattaatacaaattactatagacaaacggtagacagcaagattgctgaattagaaaaaagagtaaaatcatcgtaaaaaatcagtgtttctgcataaaacatggtattctaaaaaaggcgtaggtttctgcgtctttttaaggtgagagaatagatacctgcagcatccaaagaacgctatgtcatctacgaggagaagggagagagagctgtgcaaagcgtaaacaaaacagaatttcttatgttcatttttatttgcagtttatttgtcctgtttattgaaattatgttttttcacagcggcttgatcttttctgtattaattgccggtgcgttcatgtatattgggcgaaaaaaaatgagaagaaaactagggcgcattttattttggattggcgttattgggcttgtgttgaatatatttaatacagttgcctttaagtttttaattattgctctttttctgtattttttacttagatttattcaatcaagaaagcatccggttgaattcagaccaactgacgaatttacccagcagccaaaccaaagtttggtgcaggtccggccggttttgacgaataaacttcttggtagtcaaagaaccgaagactccgtatacgaatgggatgatattaatattcaaagcgtatggggagacattgtggttgatttaagcaataccgttctgccaaaaggcgatgcggttatttttattcgtcaagtgtttggaaatattaaagtgctcattccttacgaaacggaagtatctgtgaatcattctaaactagcaggaaacgtaacggtttttggacatcagcgcggcttttcgttcaatgaaaatttgtctatcaaaacagagggatttgatcaatctgctcatagggtgaagattgttacaactgttgtgattggagatttagaggtgcaaaggatatgagtattcttcaacggcagttattatgggggattttcctaagtttttttgtatttgtatccgtgctccttaccgtgttttttgcatatcctgtttttcaacttagcgacttatggaaaacaagcgtattggggatgccttttgtgctgttttccttcagtttgagccttacgattggaagcgtgattggaggaatcatggggtttatgtggagacagcagtggacatatgttgaaaaccgattatatgaaatagaaaatggccaccggcatatgtcggcaaatgaaccgcttattcaagaaacgtctcgaattataagccgtttaaataaagtagattataaaatgattcttcaagcacagcaatctcaaaagatggcaacggaaaaagtggaaaatcagcaaaagcaagtgcaagaaattgtttctcaggaacgaaatcggcttgctagagaactgcatgactccgttagtcagcagctatttgccgcttcgatgcttatgtctgctattacggagtccaatcttacgctacaagactctgaagctaagcaattaaagatggttgaaaaaatgattaaccaatcacagcttgaaatgagggctttgcttcttcatcttcgtcctgcagcattaaaaggaaaatcgctgcaggctggaatgaaagaactgatgaatgagcttgctcaaaaagtaccgcttgaattaaattggaaaatagaagcatttgaacttgataaaggcattgaagaccacttgtttagaattttgcaagaatccgtatcaaatacgctgcgtcatgccaatgcaacagctttagatgtgctgctgattaaacgtgatttttccattattttacgtattgttgataacggagttggttttgatgtagaaaaggaaaaagtcggatcgtacggactgcaaaatatgtacgaacgcgcaattgaaattgggggcctattaaaaattattagcttgcccgacaagggaacaaagctagaagtaaaagtaccgttagtagaaagagaggagaagcaaaatgattaatgtactgttagtggatgaccatgaaatggttcgtattggcgtaggagcgtatttgtcggctcaagcagacattcatgtaatagctgaagcagcaaacggccaacaggccgttgaattagggcttcagctgcgcccggatattattttaatggatttagtcatggaagaaatggacgggattgaagcaacaaaacaactgattaagcagtggccagaagcgaaagtgatcattgtcactagctttctagatgatgaaaaagtatatcccgctctagaggcaggggcaacaagctacttattaaaaacgtctaaagcaggagaaattgcagctgctattcgccgtacatatgaggggcaatctgtattagagcccgaagtaaccggtaaaatgatgtctaaaatgagaaaaccgtctttacctcatgaagaactgacagctcgtgaaatggaaattttactgctaatgacacaaggcaaaacaaatcaagagattgcagacgaattatttattgcgctaaagacggtaaaaacacatgtgagcaatttattaagtaagctggatgtacaagaccggactcaagccgtcatctacgcctttaaacacaaattagcgcagtgagaatcgttattcaaaagagaataacgattttttttgtgaaaaacctatttttttgcatgtattcattataaaatagcgatatgcgtaaaggcaaacgcttacgtaaaagcactattttgaggggttgagcacatggaaaagaaatggtggaaagaagctgttgcgtatcaaatctacccgcgaagcttcatggattcaaacggtgacggaattggtgacattcaaggggttatttcaaaattagactatttatctgatcttggaattgatgtcatttggatttgcccgatttatcagtctcctaacgacgataatggctacgatatcagtgattataaagatattatgaaagatttcggaacaatggaagactttgatgagctgctagatgaagttcaccatcgcggaatgaagctgattatggatttagttattaatcatacttcagatgaacacccttggtttttagaatccaggtcttctaaagagaatccatatcgtgattattatatttggcacgaaggtaaagatggaaaagagccaaacaactgggaatctatttttagcggatcagcttgggagttcgacgagaagacaaaagaatattacatgcacgtattttctaaaaaacagcccgatttaaactgggaaaatgaaaaagtacgtcatgagctttatgaaatggttaactggtggttagataaaggaattgatggttttcgtgtagatgctatttcgcatattaagaaagtggccggcttcccagatctaccgaaccctgaaaaactagattatgtgccatcgtttgaagggcatatgaatcgaccgggaattcaagaacatttaaaagagctaaaagaaaatacgtttgccaaatatgatattatgacggttggagaggcaaatggtgtaacatcggacagcgcagatgagtgggtagctgaagatggcggaaacttcaatatgatttttcagttcgagcatatgggactgtgggataaaggagaagaaaaaccgcttgatttaatcgagttaaaaacgattttaactaattggcaaaatggtttagaaaaaatcaacggctggaacgctttatatttagaaaatcatgaccaaattcgttctgtaaataaattcggcagcgtagcttaccgagtggaaagtgcaaagtgcttagctgcactatactttttaatgaaaggaacaccgtttatttatcaaggacaagaacttggaatgaccaatgttaagtttgattctattgacgattatgatgatgttggtatgattaactactaccgtattcagcgtgaaaaaggcgatacacatgacgagattatgaaagtaatttgggaaacaggccgcgataattcaagaacgccaatgcagtggaatacagaaagaaatgcaggattttctactggtaccccttggatgaaggtgaatccaaattacgtagatattaacgtagaagagcagaaaagtgatgaaaattcggtactgaatttttacaaacagctcattaaaattagaaaacagcatgatgtgctggtgtatggaacttataagctattggcagaagaagattccgctatttacgcgtatacgcgaacattagaaggtaaaaccgctgttattatttgtaatatgtcaccgaaaaatcaaacgttcgagtttccttcagagagctcgttttcaaacagagaagtgctgattcataattatccgttggataaaaatgaaacgcttgaaaaatgtacgctgcacccatatgaaacacgtgtatacttactttcataaacaagttgagcaaccgattgcgcaatttttaaagtgaaaagcttttaaaaacacatttataggcgacataggtgaagaaactgctggctctgtcaagagcgagcagtttttgcattttaataaaaagacggagaaagctttgactacggcgcatgtatatggtacttttacacttagtgtagataattagaaacaaaatgaggttgaaaaatggcgaaatataaaattattgcaacagcagcaatgggaattgaagcactggtcgctaaagaagtgcgtgctttaggatatgaatgtgaagtagataatggcaaggttatctttgaaggagacgagctcgcaattgctcgctgcaatttatggcttcgtacagcagatcgaattaaagtgcaggttggacagttcaaagctcgtacgtttgatgagctttttgaacaaacaaaagcattaaattggggagattatttgcccgtagatgcacagtttcctgtatcgggaaaatcagttaaatctaaattgttcagcgtatcagattgtcaaagcattgtgaaaaaagcaattgttgacagcatgaaaaaacattataacaaaacaacaggatggctcgaagaaacagggtcaacgtttaaaattgaagtagcgctattaaaagatgttgctacattaacaattgacgcaagcggtgcagggcttcataagcgcggttaccgcgtggggcaaggggaagctcctttaaaagaaacgctggcagcggctctaattatgctaacgccgtggaatgcggatcgtccgtttgtcgatgttttttgcggttcaggtacaattgctatcgaagcagcgcttatcggtcaaaatattgcaccaggatttaaccgtgacttcttatcagaagaatggccatggatgtcagcaagtatttgggacaaagcgcgcgaagaagcagaagacttagcgaactacgaccaagtgctagatattgctggtcatgatattgaccatcgtatggtaaaagtagcggagcaaaatgcatttgaagctggacttggagatttaattcaatttaagcaaatgcaagtgcgcgattttacgacgccgaaagaatatggaatcattattggtaaccctccgtacggcgaacgtttaagcgatcgtccttctgttgaaaaaatgtacgctgaaatgggcgaagcgttttctaagcttgatacgtggtcgatttatatgcttacatctcatgaacaatttgaacaatactacggtaaaaaagcaacgaaaaaacgcaaattgtttaacgggtttattaaaacagactactatcaatattggggacctcgtcctccacgcaacgatcaataaatacaaaagccaagcggtgtaaaaaccagcttggcttttgtacgttattttcttttaaaacctcgataagctagcattccaaacatgcctataccgagcacgacaattaataaaataaaccaaaatgtagcattaagcaggtatttatatagtccgtcataataatcatgcatatactcaccccattatgttttttatagtatgggcgagtagcagggcaatatatgtattcatttcttttcaatagcaggcctaaaacgagaaatgattagcttatttctaacatatttatgaaagggaaatctcatactaaaacctaagaggcgataaaatgagaaagaatcgatcagcagggatttttggggggctgatgcttctttcatggttaaccatcccttttataggacgacagcatattaagcgctatttatcatctactatgtttatttcctttttaatcatggttgaaagctatattgctgaaaaaaagaagtggtggatattccctaatcctcctcatccatatctaacaggtgaagctgctttacttttaggtccatttttagcaggttctttatggattaaaaagttcacatatggccattttggaaggtatatgttattaaatgcaatcgtagatacattttttgtttatccttttcaacgagctatgagccgtgcaaagctttttagggtaggcacatttaaaaagtaccatttgctaggtacctttctgttgaaagctgctttaatgtacgtttaccaacatctagtagtagagaaactgaaacctcagcgtgctttaaaaaataatcctatagaataatgggacaggcagggaaccgtgattttcttgcctgctattttaatgccccagatgtcattcctgaaatgaaatgcttttgcaaaaacacgtacgcaatcaataatgggatagaagaaagaacgactgctgaaaacagcatagggtaattagtcagaaattccccttgaaagtccaatagtgcaataggcagcgtttttacttctttagattttaacaatagcaaagggaataacagatcattccacacaatcacaaacgaaaaaattcctactgtagccattgatggtattgagagtcgaagagcgatttttgaatatattttccactctgacgctccgtccatgcgagcagcttcgaatagttcccttggcaaagttttcataaaacccgtgataataaacacaccgatgggaagcaaaaaacttatagagacgataatgacgcctgttagcgtattgacgagtccaagcttattcatcagcaaaaagacaggaatcatattgacttgagtagggacaatcattccgcaaacaaaaaagccgtatacaatccagccaagcttttgaggtagttgaataatagcataagcaatcatgcttgaaaaccatagaataaaaaacgtgctaaagacggtaacaatcacgctgtttttaatatagccaaagatgggttcattgacgagcagctgtttataattttcaatattccagcctgctggtaatccgattgggttgctgtaaagttcaggcgttgttttaaaggttgttaataaaaccaagcttaagggcaacagaatgatcaaaccgtatatccctaaaatcagttgtctgaatgggttttgtttcataaaagaatctccttttacattttggtcaagcgaagtacgcgaaattgaagaaacgttaaaagagcaattacaatcataaatacaactgaaatggcagaggcatagccgaaacgaaaattaataaaagcttcgtgataaagaagtgtcgaaagaatttcagttgagttggagggacctccatttgtcattgcaatgattaaatcaaatgctttaaaactttgtatggtcgtataagctacaaccattgtcgtagctggagctaaaagaggccacgtaatgcgcttgaatttttgccatcgtgttgctccatcaatactagcagcttcatataactcactgggaatagcttgaattccagctacaaaaataataagcatttgaccagtatgtgcccaaaattgtacaaaagccaagctgtaaattgcgatatgtccatttccaatccaagactgggtccaatgctcaaggcctattttacttaaaaacaggttaactcctccaatgttggggtcatacataaagttccacgtgaaggcaatcgatacggacgaaataatcgtcggtacaaaaaagagtgagcgataaaatgtattccatgcagaatttttataaagtaaaagtgcaaatcccaagctcaataaagtttgaaagatcagcacgccaattgtgaattttaagttgtttgtaagagactgtgtaaaaatagcatcgtttgttaaaatttctttgaagttttgaaaccctacaaatgagaactgagaagacaatccattccaatcagttgtgcttaaaaataaagcagaaagcgttggcaatgcaaagaaaacagtatatatgataaagccgggaagtaaaaacaaccatagatgtcggcttttagagatacttttaaatgaaaagagaggaaaagagaacgaaggggttctcttttcttcttcttgaatagacgtattagtttttagcgacacgttctacctctccttgtgctttttcagcagcttttttcgctgacataccggatagtacgtcctgtacagatgtttcaacagcttttgatacgcgctcatttaaaattgtaaatcgaggttggaagaccgtttttttgcctttccattttgcgctttctttgagttcaggtgaattatatttcacgtctttgaccgttaataactggccagtagcattcgcatactcagaagaaatctttggatctgcaaggaaagttaaaaatttcttagcagcttctttgtgttttgatttttcagcaacacctaataagaatgtcgtggtatgaacaccttcgtattttgctttatcttgatccactgtaatcggtgcaagcaaaccttgatcaatcttcggattttgctgtttgactgtagccatcatataagaaccttgagcaagcattgcgcctttttcctgagcaaaaagtgctgcagcactttcttttttcgtaccaagagcatctttttggaagtaacctttgtcatttaattctttaatttgggatagggttttgataaaccattcatcagttagcttgcgcttgcccgtttctacttcgtgaagggcgttgtttgtaggttcgttattcataatcattggattaataaattgagaaggacttacgtctcctgaaaataaaatcggcgtgtatccatttttctttaatgtttcagatgtttttaaaaagctattccaatctttaggaacatctaaatttaatttttcaaaaatgcctttgttatagacagggatgttatagactagctgataaggaagagcatattgcgtattatccgctttccccgcttggattagcttttcgtcaaatttgctgagtaagttttggtcgtccaactttgcaaaaccgtttgctttgcgaatcgtttcaaattgacttcctggaaaactagcaaatacatcgataccttctccagatagtagagatccttgaatttgtgattgataggaatcagaaggaaagacggtcatttctacatgaatatttggatttttcttttcaaattgctcaatgatagaatcaaaagctttcgaatcttctcctcgccaatgcgtaaagttaatggttacttttttagaagagtcgctgctgtcgccgcttgttgaactgtttttgccgcagcctgcgatgatcacggtgagcattgctaacagaattaataattttttcattttagttcccccacttatagaattcattttagatagttattggtcaattttgatacggttggtagatgcctggtcaaagaaatgagcatgattcatttgaaaatgaaatggaaagtgctgataaacttgaatatgttcatccccagggattttagccacaaagagctggtctcctaaactactgtatagcatatactctgctcctaataactcagacacatctaccggtaatgaaatatgaggagcatcagaagaggcccgcgtaatatgctcaggtcgaattcctatagtaacgaactgattgttgtagcctttttcatgtaacgaatgcatttgattttctgtcagttgaaactcatgttcactgatgtgcagtttgttgttcactacttttcctgtgaaaaagttcattcccggtgatcctataaaactagctacaaacgtattctctggagcattatatatttgcataggtgaacctatttgctgaatttttccatctttcataactacaattctgcttgccatcgtcatcgcttctgtttgatcgtgggttacataaataatggtcgtctgcaacctctgatgaagcttactaatttcagctcgcatttgtacgcgaagcttggcatcaaggttagataaaggctcatccattaaaaaaatttgggcattccgtacaatggctcttcctaaagccacccgctgacgctgccctcctgataacgcttttggcttgcgttttaaatagggttctaagtccaaaatacgagccgcttctcgaacgcgctcatcaatttcttgttttgggactttgcagagctgcaagccaaatgccatgttgtcgtaaactgttaaatgagggtaaagcgcgtagttttgaaacaccattgcaatatctcggtccttagaaggtaaatcgtttgcacgatctccattaataagcaattctccttctgttatcgattcaaggccggcgatcattcgaagggtagtggatttgccgcaccctgaagggcctacaaatacaataaattctttgtcttgaatatgaagattgaaattatcaactgcaagactatcttttcggtattttttatacacatgctgtaactgcagttctgccattttttctcctttcagcaggcttttaaaaaaataaaagcctctaattgcacagacggtttgtacgtgtatctggcaattagaggctatcggttgaccggtaagcctgtattatgtagttttgagtgattgaatctgtaagtaattttaaaatatattattcctatatgtcaagtgagaattaagatattttaataagttcgattattttcttaaatgaaagaagccacttattaagctagagatgctggttttgagaataaaacaaacagctggtgtgtagaatgatagtattcacttttatagtaagcactacagagagaggatgtttataaatggatagaaacacggagttcactatgattcgtcaagcgttggaaaacagctatcatttaatgcagcagggaatagaagtaagcggagaaacgcttactcagctggaacaagcaaaagccgagtatgaagcggcctttttattgtctcagtccacggactcaaaattccgctgtaattaatttttaatagtacttattccgtttgtgctctatacactcagcttttatacaaaaaggttctgtccttacaggcagaacttttttatgttcagctctttttattgacattttagataaagtagtcaataattaagttttgcttacatgagaaatttactagataaaaagaagtgaagctaatttttattgatagatatttacataaataaaggagtcagtatcgatgatgagagagcggttgccttttacaattgagcgggatgaaaacttttttgacaaattaaatgaatggataggtgatgttttttatgaacatcttccagacgcggggttagaacttcgggatgaacaaatttttatggcttttcaaatcgaacgagcttttaaagaaaaaaatgtaatatttgcagaagcaggtgtaggaacagggaaaactattgtgtatttactgtacgctatttgttatgcaaggtatattggcaagccagctattattgcctgtgcggatgaaacattaattgaacagttagtaaaagccgaaggagacattgcaaagctctctggtattttagatattaacatggatgttcgcctagcaaaatctcaagatcagtatctgtgtttaaagaaattagatgctgtgacagcacgaacagataatgaaaacattgaagaaatttacgatacgcttcctgattttgttcatgatcatagcggtatgcagtcgttctatcactacggagaccgtaaagaatatcctcatttaacggatgaggaatggaatcaaattaactgggatacgtttcaagactgttcttcctgtgagcagcgtcatagatgcggcttaacgctttcacgtgagcactatagaaaagcacatgacttaattatttgctctcacgatttttacatggagcacatttggacatatgaagcccgcaagcgtgaaggacagcttccccttcttcctgaaagcagctgtgttgtatttgatgaaggtcacctgctggaatttgctgcacaaaaggctttaacatatcgcattcaagaagatacgttagaaaacttgttaacgcgtctattagaaaatgacgtgcgagaagaatttgctgtgaagatcgagcacgctatcgatgtatatgcaatgttctttgaccgtttaagtgaagcaagtacagaaatcgttggttctagccgtaaagaagtagcccgcacaaacggattacaaagtgtaggaaaagaacttttatcgctgcttgagcatatcggaaacgagcttgtgtttgagagtgagacctatacagtagacgagtatacgctgcgaattgtagatgagtacctagatcaaattgattattcgctgcgcttatttatggacaacgaaaatgccatctactgggtagaagaaaataactggcagctgacgttggttattatgccgcaagcagtaaaagacgtcttaaaagaacgagtatttgcgaagaaaataccatatattttcacttctgcgactctttcagataaccaatcgttcgattatttagcatatagcttaggaattgcaaagccgctttctttttctgttgaatcgccatttgattatgatgagcaaatgaaaattgcggtaaaaaatgtttcggatgatcaagaagaagcgtttgctgaaaaattcgcctttgctgttgcgcagctcgaaaaaacgaacggacgagcacttttactgtttaacagcaaagaagaactagagatgttcaaagaagtttccaaagagttaaatcagtacacatttttatttgaaggcgatcaagaaatcagtaaattagtatctcagttccaaagggaagaagaaacgattttatgcgctgttcatttgtgggaaggattggatattcctggaccttcgctatctaatgtaattatttggtctctgccgtatccaccaaatgatccggtctttgaagcaaagcgcaatcaagtagtcgatccattctgggatgcagatatgccgtatatgcttcttcgcttaaagcaaggagttggaaggctgattcgctctcataacgataagggtctaatcacgatctttatgccaaaaagcacagattcaaaagtgcgttcaatcattgaacaaaatgtcccaacgaaaatagaaaacgtataaaaaagcgcggttgtagccgcgcttttttatacgtataatagattgaatattcagttatatacatgccgttactattatgataaaataatttatggtgaaataaggaaagtaaggaggaaaaacaatgagagaagacatacagaaaattgagaaacagttttatgaatacatgaataaaatcaaaagttatcaagaggcaatcggagtgatgtactgggatttgaggacgggtgctccaaaaaaaggggcggatcagcgttctgaagttattggtatgatttcatcagaagcgttcaatctttctgtttctgatgaaatggcaggttttattgagaaattaacgaaccctgagtcacagccttacataaacgatattacgaaaaaagcagtggaagaatgtaaaaaagaatatgatttaaataaaaagattcctccgcatgaatataaagaatacgttacattaacttcaaaagctgagtcggtttgggaagacgcaaaagaaaaagcagattttgctttatttcaaccttacctcgaaaaaattgtagcgttcaatcagaagtttgtggagtattgggggtatgaaggaaacaaatataaccgtttattagacctttttgaaccggggatgacggttgaaatcttagacgaggtatttggaaagctacgggagcatattgtgcctcttgttcagcgaatcgccgggtcgaatacaaagccaaatacggaatttttattccgtactttcccaaaagaagcgcaaaagcaatttagtctagacgtgttaaaaacgcttggctatgattttgaagcggggcgacttgatgaaacagtccatccttttgctactggcttaaacccgggagatgtgcgcatcacgactaagtatgctgaaaacgatttccgaacggctatttttggaacgattcacgaatgcggccatgctttatatgagcaaaatatttcaaaggatcttgtcggtacggttctatgtgaaggtacttcaatgggaattcatgaatcgcagtcgctgttttttgagcagtttgtcggaaaaaataaagcattttggcagcatcattaccacgtactaaaagagcatgcgccgggacaatttgacgatgtagatttagaagatttttaccgaggagtaaatgaggcgaaaccgtcgcttattcgtattgaagcagatgagttaacgtatcctcttcatattatgattcgctatgagattgaaaagggattaataaacggagaatataaagttgcagatttaccagaaatttggaatgagaaatacgaagaatatttaggagttcgtccaggtcacgatggagaaggcgtgcttcaggacgtacactgggccggaggaagctttgggtatttcccttcctacgctcttggctatatgtacgcagctcagtttaagcataccatgttaaaagacttgcccaattatgatgaactcctcgaaaaaggagaaatttcgccgattacaaattggctaacagaacatattcatcagtacggaaaaatgaaaaagcctcttgaaattttaaacgatgtaacggaagaaggcttaaatgtagattatttaattcagtatctagaaaagaaatatggagaaatttatcacgtataaaaagcgctataaccgaatattatgttttgtatcacaagtaaatgttcgaaaatatcgtttttagatattttcaaataaaagatttgctgatataatacaattaactcaataacgcactcatataatgacgagaataaggctcgtaagtatctaccaaactaccgtaaatagtttgactatgggtgagcgatgaagtttgtttttcacttttgtgcgtaaaagctcaaagacattgctctactcatatacgagtgcagctatgtttttgagcttttttaatacaaacgttggaggaacgaactatgaaagctttgcaaaacaaaattttaacagatggtatcgtattatcagacacggttttaaaagtagacacatttttaaaccaccaaatggatcctgtattaatgaaagaaattggagaagaattcgcttcgcgttttgaagatgcaggaattacgaagattttaacgattgaatcatctggaattgctccagcgattatgaccgcattgaagctaaacgttgagatggtgtttgctagaaaaagaaaatctttaacacttcaagacggactcattacatcaaaagtatattcatttacaaaaaaagaagaaaatgaaatttcagttgctgataaatttattcaagaagatgacgtgattttaattattgatgactttttagcaaacggtcaagctgcattcggcttgatggatatcgtgcaaaaagcaggtgctaaagtaggcggcattggtattgttattgaaaaagcgtttcaagatggaggaaaacaaattcgtcaatcaggcgttaaagtagaatcattagcacgcattcagtctttatcaaatggtaaagtgacatttgttgaagataaaccaacagtggaggtttaatatgaataaaggaaaagtcttttcacttggtttacagcatgttttagctatgtacggaggtgcgattgttgttccgcttattgttggaggagccattggcttgactcagcagcagcttacgtatttagtggcgattgacttatttatgtgcggtgtggcaacactactgcaagtatggaaaaatcgtttttttggaattggtcttccagttgtattagggtgtacgtttactgccgtaggacctatgatttcaattggaggttcttacggcgtttcctccatatatggttctattatcgtggctggtttactcatcgtccttctttctgcttttttaggtaaattggttaagtttttccctcctttagttacaggttcggttgtaacgattattggaattacgttaattcccgtagcgattaaagatttagccggaggagaaggaagtaaagattttggcagcttgagcaatctaggtttaggttttggcgttttgttattaattattgttctgtatcgatttacaaaaggatttatgcgctccgtctctgtgttattaggattagttgttggaacaattgcagcgtcttttatgggaaaagtcgatttttccggcgtaaaaggagaagcgtgggttcatatgccacatgtgctgtactttgggatgccaacttttaatattatggccattctgacaatgttccttgttttacttgttggcattgtcgagtcaacaggcgtttattttgctgttagtgatatttgtaaaaaagaagtggatgaaaaagatttgtctaaaggctatcgtgcagaaggattggccattttattaggcggattttttaacgcatttccttatacagcgtattctcaaaatgtaggacttttacagttgtcaggtgttcgcacaagaaatgttgtatttgcagcgagtggaattttaatcgttttgggttttctacctaaaatcgcagccgtgacgacagttatcccgagctctgtacttggaggagcaatggtagctatgtttggaatggtaatctcttcaggtattaaaatccttagtcaagttgatttagccaaacaagaaaatcttcttgtgattgcatgttcggttggcatgggtctaggggtgacggttgtacctgaaatcttcaaaaacttaccagagagtcttcaagttcttactggaagcggtattgtaatggggagctttacagcaatctttttaaatattgtctttaatatgatgaaatcaccacgtacgcaagttgcagaaacaaagttaacaaatgaagtagtatcgaaataaaaagaggctagaacaaaagtattttagtgaagaagatccgaacgattaatcgttcggatcttttcattgtcctaaggaacatagctttaacaagcgatccatagcagatcatttgtccaatttgttcgtctttcctattaagaccgtgttttgaaaaagagtgtataaagcattttccccacgtcagggttttttgccactaatgaaatttctcttttgaatttgaagtctgtaatgggtaacgctttaatgtttgagctttgtaaatggcgcataaaaatttcagggagaattgaaatacctaaattagctgaaataaatcccataatactttgcgcaaattcaatttcattggaaatggaaatttttaagttatgacgcttgtacgctttttctactagtgtccgaacatcgcaccttggggggagaactacaatgggttcttctttgaaatcttcaaataatacgctttctttttcggctatcgggtgctgatcattcacaaataaataaaagtcttctttgaacaatagttttgaccagtaagtatgttgaacctctcgatcatcaaataaagccccgtcaatttgattgctttctaactgctctaacaaatcataatagtgatgcgaggtttttatatcaatatggcgattgtgctctttagcagaagccagttgataaggtaagtaaaaagcagccatactttgccacgttccgatagttaaatcacaagcttcttgcgtagacactaattttttttgaagagcatgaacacttgaaagtatggattcaccttcttgtaaaagaatttcacccgctgaggttaattctactcctgtagcggagcgaataaagtgacacatggcaaaaagacggacgcattcgcaaattaacatttactggttcaacagcggttggtaaacatttaatgcgcggtgctgcggatactgtgaaaaaattatcgctggaattaggcggtcacgcaccgtttatcgtaacagaaaatgcagatttagacgctgctgtaaacggcgtaattgcttctaagtttgtcaacgcaggtcaaacgtgcatctgcacaaaccgcgtatatgtacaagaatccattgcagatgcttttgttgaaaaatttgcagcaaaagcagcgcaattaacagtaggaaatggattagaagaaggtacacaagttggaccgttaattaacgacaaagtggttgagaaagtaaaagcacaaattgcggatgcaaaaagtaaaggagctaaagttgtggttggcggacaagctataacaactaaaaacggtttctttatggagccgacaattattacaaatgtaactgatgacatgaattgcatgtttgaagaaacgtttggaccattggcccctgtagcaacattcaaaacagtagaagaagctgtagaacgagcaaacaatagcccttatggtttagccgcttacgtatttacagaaaacattaaagaagcaacgtttgtatctgaagagttagaatacggcattgtaggagtaaatgatggctctccgtctgcagctcaagctccattcggcggctttaaagaaagtggtcttggacgcgaaggaagtcattacggcattgacgattatttagaagtaaaatatatctcaatgggactttaatcaaaagtagagggacaaaaatattttagtcgaagtgaaacacgaactagcaactaataatcaaaattattggttgttagttcgtatttttttgttgtgaagatggacgtagctttcatgtgtttcgttgtgtcccagcctcttttttatgcacttttgtaaagaaaatttggaataatagttctttaacgcaattaattgcatttctaggatgtctgtgcaagaataagtatttcaaaaatggtttagctttgtttaaagcgtgggtaatacaacaaacgcacatgattgcttgttagatgaaataaaaagcagaactttaccactgataaattacccacgctagaaccaaaatagtagtactgaatggtgaaaaatataggagttgatatagatgattacagcagagaaaaacatagtgaaatttaaagcaaaagacggacgtgaagtcactattcgccctgcacaggcaagcgatgcagagcatattacaacagcggtaagagaaattattgaggctggggaatttattcaaaaagatgagccgcgtacagtccaagaagagcaagattttattgcatcagtagaaaagaacaatcacatgtacgttgtagctgaagtcgaaggtgaagtacttggaattgcacgtgttcttagaggcgaaattaaaatgaagcgccacacggggctcttccgtacatggcttatttcaaaagcacagggaatgggaataggaaaacaatttatgaattatacgctaaactggtgcaaagaaaataatcttcataaactttctttaactgtgtttgcttcgaataaagtggcatacgaattgtatagaaaggtaggatttgaacaagaaggcgttatgaaagaacaagcttatttcaacaatgaatatgtagatgaaatctatatgtccattttcttttcataaaaaataagcacttattttcgtcaatccataaattgtatctgtacattcagattatttgcgctataataaaagtgcacaacaaacatacacttcttcaaaacgtagactttcctgagttacaggaaagtttttttatgtttcgcttccattccactaaaaaagaattgaataaatccccagctattacaaatgttaaatgtaacgcaatcaaagaggtgaagtgtatgccaaagattatctcagttggatttggagttcccccttatgaattaactcagcaagacacgctgctatttgcaaaagaacttttttccgaatcatttaaagatattaatcggctgctgaccgtttttcaaaatggtcaaattgagaaacgtaattttgccaaagacttgtcttggtttcaagaagatcatacatttgaagaaaaaaatgatgcttttatagaatctgctgttgaattaggtacaaaagcgattgaagactgcttaacaaataagaactatgtaagtactcctttgccgtgtggagaaattgaggctgttttttatgtttcaacaagcggtttagctacgcctagcattgaagcgcgaattatgaataagcttgcgttctcagaccatacaaaaagaattcctatttggggattagggtgtgctggaggagcgtctgggctttcaagagcttatgagtattgcaaagcctttccgcgtgccaaagtccttgttttatccattgagctttgcagtttaacttttcagcgaaatgatcgttcaaaaagcaacttaattggtacgtctttatttgcggatggagtagcggctgctttagtcgcaggtgacgaagctgataccacttttgcccttgcaaaaagctatcctaacattttacatacacaatcgacgctcatgcccaattcagaagatgtaatggggtgggagattaaaaatgatggactatttgtcgtcttttcaaaagatattcccacgattatcgattcgtggttaggcggagaagttgagtcatttttacaaactcagcatttgaccagtcgcgatttgaagcattttgttgctcatcctggagggaaaaaagtgcttgaagcatatgtatcaacgctgtcgttaaacgaaaatatgattgctgattccctagatgtacttaaaaaccatggaaacatgtcttcggcaaccgttttgtatgtgctagaccgctttatgaagaaagaaatttcaagtaaagaatacggtttattaacagctcttggccctggatttagttctgaaatgcttctattagagtggaggtaaagcgattgtttttttatagcttttttgtatttattatcttacagcgtctatgtgaattggttattgccaaaagaaatgaagcttggatgaagaggcagggagcatacgaagctggtcaaagtcactacaaatggatggtaagcatgcatgccgctttttttgctgctctttttacggaagtgtacgtgttaaacgatggaatgtatcgcttttcttttttgttgtttagcttttttgtgcttgtgcaacttgcaagaatatgggctatttcttcgttaggaaagtattggaatacaaaaattatcgttttgcctaatgcgaaggttgtgctaagaggtccttatcgttttatgaagcaccctaactatacagtagtagcggcagaattggtgttagttccgcttatgtttcaggcatactggacgttagctgttttttctgttttcaatttgtgtatattagccgtcagaattcccttagaagagcaagcgttaacgaatgaaacaaattacggcgaagtgatgcaaaacaggggacgtttctttcctgtaaaaaaatcttaaaactaattgaaaatgaatatctttcatgataagatgaaacaaatgataaagattatcaatttcatcaagtagaaacggtggtggacgtaatggttagtctttttgtgatcggagcacttgctacatatgttggcgtcacaacgtatgtaatgaaaaatattgaaaaagcccagaaggcgtaacatacatgcgatgaataaaaaaagctgtcaaattattgacagctttttttattgtttttgtaactaaaaattcagttttttatgggaaaacgcatgcgaatcaagtaaaatagagaaagaataagcagaaatgaagatggatagagcacatttaaatacagtcttgaatgaggcaaaaggggtagagtaataatgggtaaagtgagtgtgaaacatcaagaaaatctccgattggaagcatctctttttcatttacataagcaatttcaagcagctggagatgaacagcaggcagcaaaagcaatacagctgttaaaaaagtgggtgaacggcgaatttgttgtagcattttgcggacatttttcggctggaaaatcgagcatgattaacgaattaatggggcaagcaattttgcctgcaagtcctattccaacaagcgcaaacttagtatcagtaaaagcaggggatgagcatgcaaccgtttattatcgcaaacagtcgccggtgcgttatgaagcaccttatgagtatgagcaaattaagcagtttgctgtggatggagatgaagtagagtccattcatttatcgatagatacagatgctattcctaaaaatgttgtggtgatggacacaccaggaattgattcaacagatgatgcacatcgtgtatcgaccgagtcagctcttcacttagcggacgttattttctacgtgatggattataatcatgtgcaggcagaattaaatcttcaatttgcaaaacagctgcaagaagctaataaaacgctttatttaattgtaaatcaaattgataaacaccaagaagatcagctaacatttcaagcatttaaagaatctgtagaaacgtcatttttaaagtggaatgtgagaccagaaggaatcttctatacgtcgttaaaagagccaaccaaccgtcataatgacctttcgtacgtaaaatctctattacttgctatgatgacggaaaaagaaaaccggcatcagcatattcaacatgcgatgcaaatgttaattgacgatcaccttgcctttattgaagaccaagaagaagaaaagttaacgattcatgacgagctgcgccataagctgacgcttgagaatcatgaaatgaataagcatcaaaaagagcagcttctcgaaaaagaagcggaaataaggcgtgctgaaaagcagctagcagaaacgtaccaacaagaaacaggtaagatactaagcaacgccaatttaacaccatatgaaatgagagaaaaagctaggctgtttttagaaacgacaaagcctgattttaaagtaggtcttttatttgctaagaaaaagaccgaggaagtaaaaaaagagcggctgacgttattttttgatgatatgaaagaacgagcagcttctcagctgcagtggcacttgcagcaatatgtgcaagagctggtgaaaaatcaaaatcttaccgatccggatcttatacgccaggttcagcagtttgaaattccgttagagccgcatgatttaattgaaacggtaaaggcaggagctacgattaatggtgattatgttttaacgtacgcaaaagatgtagccgagcatattaagaaaaaagcgacgcgattattatacgagctttatgcgcaaattgaacagagcaaaatcgagcaagatgaagtaaagcgtaaaaaaatttatcaacacttgcaggaatgtgaagtatttgaagaagcgtatacatctcttcaggaaatgaaatcaaaattggcacgtacaaaagctttgcttcaatctttacagcaaactgatgacgacctaacggcagaagatacaaacgagttgtcatatatgttacaagaagaatatgaaacgggcatcatgaaagctgaagaaaagcaagaagctgtgagtgagcagcagttagtttcacagcctgaggaagctgtgcatgaaacaggaacggaaaaggttcttcaagatgtatcagctgttctcgaacagctccgttcatttggaaagttagaccgctttattaccagacttcaagaaaagcgtaaaaagctatcaaatcaaacgtttactgtagctttattcggagcgttcagtgccggtaagtcatcttttgctaatgcgttgattggagaaagattacttccagtatctccgaacccaacaacagcaactatcaataaaattatgcctccaacagaaaaacggccgcataaaacagctgttgtgcaaatgaaaacaaacgagcagatgatccaagatttgaatggtgcacttaagctgtttcaccatgaagtagaatcaattgacgaagcgttaacaattattccaactctgcaggcaacagaagagctgcagctgcatttgtcgtttttacaggcagtagaaaaaggctacggcgaagtcaagcagcatatcggttcagaagtagtggtggatacagaaggatttcatgattatgtagctaaagaagaaaaagcgtgttttgttcaatttattaacctgtattatgactgtgaatttactcgcttaggcattacactcgttgatacacccggagctgattcaatcaatgcgagacacactggagtagcgtttgagtatatcaaaaatgcagatgccattttatttgtaacgtattataatcatgcgttttcaaaagctgaccgcgaatttcttattcagcttggccgtgtaaaagatgtatttgcgcttgataaaatgtttttcttagtaaatgcagcggacctagccagctcggatacagagctgcagttagttcagacctatgtaaaagaacagcttgaacagtatggtatacgttttccgcgcttatacccggtatcaagcttgcaggctttgcaaaaccatgaggataaaatgtttctgccattcaaaaatgcgttttaccgcttcataaattatgaattaccagagcttgctatccaaagtgtctatgcagatttcgaacaaattttagcagtttccaatgaaatgaaacaggtgcaaacaaaatcagaagtggataaaaagcgatacattcaatctcttcacataaaaaatgagcaggtagcagcaaaactgcatgaaattcattttgaatatgaacaacagcagtttgaccgagaattagaagagctcttattttatgtaaaaaaacgtctgtttgtaaggtacgatgacttctttaaagaagccttcagtccggcaaacttaagggatgatcgaggtgaaaagcaaaagcagctgcgcctttgtttgcaggagttgttaacgtctatttccttcgacgcaacgcaagaagtgcgtgcgaccactttgcgaatcgaaaaatacatcgtaaaattaatcgaagactggcatcgaatgatcattacaaagctacagcgctatgaaccgacgtttactccaacgttgaactcgttagagcctccaaatggcagtgaagttgtgacaagtcatcaatttgatgagaatgaatcgtatcaaaaagagctttcactgtataaaaacaataaaagcttttttgaaaaaaatgagaaagtaaagcttcacgctgctttactagaacgtattaagccggatattaatcactacattgcgaaagaagaagccgctcttcattcacactataccaatttagtgaatcagtacgttttagcgcataaacagtctgtatctgaagaatggtatgattattacaaacagctgcaagcggccgtgtctgaagaatttccaattcaagaattggtaagtacaatgacggtgctagaacatgtattggaggaaagaaagggtcattaatttttatgtctacacacataaataaacgtttacaggaaattgaaaaagaatataatgtggaaattttgtttgcatgtgaatcaggcagccgtgcttacggactcgacacgttagcgagtgattttgacgtccgctttatatacaagtataaagcatcacgctatcttcatctcaatagacctcaagaggtcattaatgtagcagaaggcaattatgatatgcaagggtgggatttgtacaaaaccatttatttgtttacaaaatcaaacccttcgctttatgagtggctatggtcgccttttgtttattatcagaagccatcgtttgctgagcccctgcggcaaatgatggctcaatcatattccttaaaagcattggggtatcattattttaaaattttaacgataaatagtaaaagaaatctgacatcttctgttacaatagaggatataaaagtgatgcttcaactgattcgtgcatttttatcactgaaagtagtagtaaagcagcgcagtttccctgtcattttatttgccgatttatgtaagcaggcaaatctcgacgataggcagcaatccatcattgagcaatttgtacagtgcaagataagcgggaaagttgcttttaatgaaaagatgaaaaactttttggacagcattaagaaagaagctgcagcgatagaaaaaagcgtaaaagaattaccggaaaagcaaatcagttatgaggacattaacttatttttactaactcagcataatataatggaggaacgaacatgagtgtacataaagaaatttcagcccattctaaaaaacaacacgaattagtacgtgcttttgcaagcttagaagctcgacgcgagcaagctattgaagcagctgtgcttctttgcaaagaagggaaacccttttctgtagacggtattaatgctgtaacagcagaaattaatgagctgtctcaaaaatataccatcattccaggccgtaaagtagtgacagaagaaatggttaaagagtacgtagcaagaatataaacgtgctaagctctggtgtttttaccttaatttgaacaggatatgacgtgccgcttgatccatactaatagtgtaccaacgaggtacaaataggaggagatagcgatgggtcgtcaaaaattaggtaataaaaatgcgcaagcgaataacaatgcaaagcataattataaccaagagttctcttctgagtttaaagcaaatcaggctcaaaaagcaaaacgtgcaaaaagtgcaaatgacacttatgctggggagtttgcttctgagttcaacgtgcaacaaaaccaaaacaattctgttaacaagaagttagaagctaataaaagtgcaaataatcaatatggccaagaattcggctcttatgctgaagttgaatctgccaaaatgaataatgctgcacaaaaaaagcgtaaaaaataacagaactgtttccaaaagcgccgagattagtctgctctgtcagcagattagcccggcgttttttgttgggcaatatttgcttgggtacgagatgtcaatccatcgcaaactatagatgaggtgaagcaatatgaataaaggaattgtcattgctctttcatcaatcggtttagcccaagccttaaaaatccccattaaaaagtatcaaacaggaaaatgggatatgcggatgattgctgcgtcgggtggaatgccaagctctcattcagccggcgtatcttctttagcgacctatgtagcgttaaaaagaggtgtttctacgattgattttgcgttagcatctgtttttggaattattgtgatgtacgatgcacaaggaattcgaaggcagactggcgaaattactattaaagtgaatacgttagatgaagaaattgaaaagcttgcgggtcttccagacggaggctttcacgatttgacggaacagcgcttgaaagaaatgcttgggcatcagcccgaagaagtgattggcggagccattttaggagtagcacttggagcgattggctattttttagaagggaaatcatagtcaaatagccaaaagtaagctaagataaagaagaacctttgcaaaaggatgggacgaaaaagtgacaaaaacagctcaaacggttgaagagtatcttctttatcttgaagaaaaaggctttcatttagcagaagatgcacgtggatttatttcatttggtcagcagtatacgcgtgcagctgacgagatggtcatatttacaattgaatggacactaaaagtacaaaaagaatttgacggcagtttttttgtatcgctcctcgagaatttgacatcaaatcgtattagcaatcaaaaacaagccattcaatatttaaagtcatcaggtatgatttaagcaggattacattcctgcttctttttgattaatggcttgtctagccagctgatcagcacctgcattttgagagctagggatccactttataaaaaataactcaaattgactggacaatttgagggcttcttccagtaaaggagcaaacgctttatttttaacgtattcttggttcattgcgcggtctactagctgagagtcggttcgaaaagatacgctcgtatactttttttctaaacaaatttttaatgcatgaagaagtgcatggtactctgcttcatgattcgtcattgtcccaagagcaatagcgtaacgatgatgttcaccatttcctttaattaaaataccagctccagaaggaccagggttgccagcagtggctccgtctatataaacttcaatcatcatacagcctccttgttaaaacaatataagcttaaaccatgttttttcatcaatagtattgtatcataagtacttcagctattttatattagcacgtataaacgctaaaatccgcttattaggtaagaaaactgtcatgaaaagacataatagaagataaaatacaaaaaagcagaaaaagtgttgaattcaaaattgctgatgaaaggaatgctcgttatgaatttccaaattgaatggcattataaatcctcgaaacataaacagttaattttcacctccgatttcacagatgcgaatgaggcgctaatgattgtgggtgatttagaaaaaacaggtcgaacgaaggaaatttttctacttgatgagcagcagcaaaaatggactgtaaaagaagcgaaaaagctcttacaggaagtacagacagagccccacgatattgtggcatattttgacggaggctatgagcatgatacgctcttagcggggcttggggttgtgatttattttaaacagaacaacaactcttaccgaatacgacgcaactcaaggctgcaagagattgaatcaaataatgaggcagagtatgctgctttttattatttaatacaagagcttgaggaacttggtgttcatcatataccggtaacgtttagaggtgactctcaggttgtattaaatcagctagctggggagtggccctgtttcgaagaagagtttaatcggtacttagatcgaatagaagataaaatgcaggagcttggtatccggccggtatatgagcctatttcaaggaaggaaaatgaagaggctgatcagcttgctactcaagctcttcaagggataccaattgctagcaggaagcaagtgtaacacacagaacgaaatggagatgaacgagagtggaacgtaaacaattattagaagaagtaacggagttattggattactactgtagtgattgttttgtaaaaaaaacgtttaataaagaaaagggcaaaacatacgctcagacgttttgtattaaagagtgtaccgtaggagaaaaaattaagcagtatggagatttgctgactaaaaagtaagcgtgtataatttgccggcagcagcttcattctatccatatggaggtgttctttcaatggataagtttttaaatgaagaagtaacaacaggatataatgatttaaagcaagtagaagtgtctattcaatctgctcaaaagatgattgggacagctacgatgagtatgagtcctcagcagcttgaagaggcaacgaatgcgcttaatgatgcaaaaacacagcttcaatctgccaaagctcatggcacaggagtagacgagcaatttcttcagcagtgcatgcagtctattcaaacatgtgaacagcagcttactgaggccaaacgctaggcataacaaaaaagagactcggaaaagagtctcttttactataaaataaaaagatctatttatgatagcttagtgacattagcggcttgcgggcctctattgccttctacaatttcaaaagatacctcttgtccttcttccaaggatttataaccttcgctttggatggcagaaaaatgtacaaatacgtcgctgccgccttcaacttcaataaagccatagcctttttcattgttgaaccattttactttaccattttgcataacttgaatccccctagtactgtgcagcctcatgctgctgaaactcgaattatcatttccaatagaggtaaatgattgtttatattatataataagaagaaataaaatttcaatattaaaatttagtgataaggagtggatcgtgtatgtatcgtacacaagtaaatggaaaagaaatcattttgttattttcaacgctcgaagcagcaaagagccgcagcaacctagagaaagagcaaatttataagcgcgtattgcatttaaatgagcagctgctaatgtttcaaaatggaacaagcttcaccattggcgatccgttaggattaattgtagctcaagtgaaaaaaagtgatttgacaaccatatatatcgaacatatcattgataaacagtttatgtatgatggagaggggcatcgaggtgaagtagtgtaacaaggtgacacctatatatgaagaagcgtacggagatactcgtacgcttcttcatatataggattaaaaatatgcgattttacaagtattaacagggataaataacaaagtttaataaattaaagaagaacagtgaaaccatgaatagcaatcacctttttagctaaaaaatatagatacacatcatcttatgtaatgagatagttaagctttaaaatcaatgaacacgagaggttttataaagcttaaattgaaaaacgtgtgattgtgacgttaattagaagtaaggtttggaggacgctatggaaagtagaaaaaaattggatttacttgctcttgcttctgtgccacttatcatgaccctcggaaattcaatgttaattccggtattgccggtgattgaaaaacgtctacagataagctcgctgcaggtatccatgattatcacggtctattcaattttcgctatttttttaatcccgattgctggttatttatcagatcgatttggccgcaagaaaattattattccaagtttgctgcttgctgcagtaggaggggctttaacaggctgggcttcatggcaaatggccaatcctttctgggttattttaattggccgcgcgattcaaggaataggttcagcaggagctatgcctgttgtgatgccttgtgtaggagatatgttcaaagacgagcaagaaattacaaaaggactaggtttaattgaaacagctaatacgtttgggaaagtactaagcccaatactgggagcttttttagcggctatgatttggtttcttcctttttggttcattcctattctttgccttatttcgattcttttggttatctttttagtaaaagttccgaaaaatgatagttcttctgaatctgaacaaaaaaagaaaagtattaagcagtttttgaaggatttgaagaaaacgctcaaagaaaatattggatggcttatggctatttttattttaggcgccattattatgcttgtattattcggtgttttattttacctatcgaccatactagaggagcgttatcatattgtgaatacgaaaaaaggtttagtgatggctattcctttgctcgctttatctatttcttcttttgtggcggggaaaaaagttggaaacaataaaatcgttatgaagtggtctgctttttttggcttcttattgttaacatgttctttcatcattttattttttaatacgtctctttttagtattttactcactttagtgcttggtggaattggaattggagcagctcttcccagtcttgatgcgcttattacagaaggaattgaaaaggaagagagaggaaccattacgtctctttacagttcgatgcgctttgtaggagtagcagctgggcctcccctttatacattgcttatgaagtggtcggacatggctgtgttccaaacgtctctaggggttagtgcggtaggtgccattttagttttaaaagcgattaaaccaaagcctgaaggtggcgtaaaactgaagaaagctgaagtgtgattttatagagctgtcttatgataaaagacggctctttgctatttaaagacccgtcaatatgcttaaatttatattgtgtctagaaaaaatccttgaaatttcttatacttcaatttatagacagcagatgcaatagttcttattttattgaataaggtggttttgaattgagtataaattatcagaaattaaaaagcatggtggatcattatcaaatatttgatcttgtagcgtatataacagaagaagtacaaagccttcaaccaaagagccttacggggattgtgaaagaatggttagcaaacttacaaacggaagaagagctgtacgagcttatccgcttttgtgatgaagctttattaaatcgtttaagtcgaatgttaacgacatatggatatcgtcgatttggctcgattcgaatggtgactctttattgtgatgatctcctgcgagaaggcaagatactcgacgctgatgatagactttctttattaatttctcagctggatacggaatcagttaaagaggaacagcttgagaaaatctattttttaaaggtaagaattcttttagaaatgaaacaagtggatgaagcttctgagtggatgaaacaagtaacgtcccataatcaaaagggtatggctgacagatggggctatttttatttgcagctcaacgacagaatgaaagctgaagcctgcttaaaagaaggaacgacatataagaagaatggagatttttgctatgcaatgctcgcagacttatatgcgtatgaggggaagcataaacaatcgcttgaaaaaattaacgaggctattgtccgctacccacagcttccgtctttatatatggataaagtgatgcgattaaaagatttaaaagagtattctctcttgcttgaaacaattgaatttatcgattcaaagttaccctatcacgattatcaagatttttttacgctgctgcgcgccgacatttattttgaacagcagcagcaatctcagcttacgcatctgctatcgaccaagcgatgcttaaaagattcaccttatcaaaaattaattggaaagaatacagacgataaatgcagtacaatcaagcttcctattgtaccaattgttcaaaaagataattattgcgtgccagctagtatgagtatgatgttaaggcttttacataccgaaaaaacacaggatgagattgggacgcatatttacggagggttaggctccaaattatcaactgcggtgagctactttgaatctcttggctttgcagcgatgttttttacaggcacaggtgaacagtttaaagaactattagacaaagggctgcctattttggtcagtctggaatttgaacaagcttcccacgttcaagttgtatttggctatgatgatgaacttgaactttttcatgtacaagatgctaattttctaagtccaacgtatgtagaatataaaaattttgatcagcattacgctaattcgggttttttatcaattgttgcttctaaagcggcagcggatctcgcttcactttctaaagagcaagatatgtttattcgtcagctgtatgacttaatcgaactagttgaagcggatgaagaggcacacattaatgatctcgtttctttactaaaagcaaatgagcatgttccatttgccgctatttacagtatgaagcatttgtatagaaaagagcatgaagcctatattcgtacgtgcattaaccatgtattagagaaatatagcaatcatgattatcttaagcttcacgctgcatatgccttttttaaacttgacgacagtaagggagcatcttctttgttacaccacatagataacaaaaagcatagctctttttatcactatcttaaaggaagaattgcgctggatgaagagaaatatgatgaggctgttgaagcactgcgcagctcgctgcaattagacgtagagcagcatttgaactggagctatttagcacttgcatatatgtacaaaggaaacctcgaaaaggcttttgaatgctcgactatttccttaaatatgtatggcgatgaatcttatacacaaatcaatcacggacttattttaatggagaaagaaagatacgcagaagccagaaatcttttcgacgcgttattaaaagaaaacccaaaagatgcgcacagctggtttgaaagagcccgttgtgatgaacatttaaagaagtttcgtaaagcttaccggggatttcaagtagctaaacagcttttgccgactgttccttatccatatctttcgatagctgatttgctacaatatcaactagaaaaaacagacgaagctgaaagctatctcaaagaaggcatgaagcatctcccaagcgacatgacaattcgaggaagactaggcgatttatacgtcgcgaatcaaaggtacgaagaagctattgctctgtataaagaaggcttaaaaatagaagaagatgcccttatgtatttgggcttatcttatgcgtatctagaaacaggtgaacatttaacggccgttgatacgctcacgcttattgcgcagaagttttcatcgaacagcgacgtcctgttggatgcagggagtatgcttttagatgctgcaaaacaacaggagctagacaaccaaacgatagagtttggatttgctctttatgaagaaggaattcattttgctcaaacagcgttagatgaagtgttagaagcatatacgagttatttagaagacacggctttactgactcgtggaattaagtttttaaccgcagaacatcaagagcaccctaatgagattttgtacatgtgctatttaggcatattatacgaacaagccaagcagctaacaaaaagtgagaaactttatcaacaagcgcttcgtatcaagcaagatgctttaccatattatcggttaggtgaaatatatcaatcaatgaatcgcactgctgaagcaaaagaggcctttcaaaaatgcttaactcttgataaaacatttgaagccgcttgtatgaagcttgctgaaatggcttgtgaagaacaaaatcggacggctgaaaggaattggctgcttcaatggatacagctgaatcctatggaagtaaacgttgagcacgcagcttcactttgtgaaacagagaaagagtatgaagagctgttagaggtattaaaaagcgtagaggaaagcgttttgcctcagtggcttgctgacagccaggctcatgtgtatcgcctaaaaggagacatttcacaggctgaaacgtatttagagaaggcgcttgaactagatccacagaatcctgctattcgccatcatcaggcgaaatggctcatcatggagcatagatatgaagaagctagaaaaattcttacagagttactaagtgaggatccggaagattacgctctatttcaaacggtcatgtccagctttccaaatggaaaaaaactgtccgggcttacggcagatttaaaaaagataaaaatggaaaaacacagcaaaagcttgttatttaaaaacgcagccgaggctttaaatgagtatgccgattcgatcgtagaagagcagcaaggatctatcttcaaacgaagcttagcaaagttcaaagcaaaagcaaaaacggttacgctgcttggcttaacgattgaactgtatgaactggctataaaaacggatccgaataataaagaggctgtgcatgcatttgcggctttttacgaagagaaaggattaattgaagatagcatcaccgtgctgaaaaaatcgctgcatcaaagctgggattttgatgttgcctatcatttagccaatatactcgttaatatccatgaaaatgaacaggctgcacatgaagcgctaaacttagttcaaaaacttcttgaacagcagccgtatcatatagatttgcagatataccgagcatttattttgagtggccttgaagaggtagaaaaatcggagacagcttttcaagaattacttcaacaggagatttatcagcctgacatatatgcaggactagcaaaactgtataataaaacagaacgttatcatgaaactgttcaacttcttcaaaaagcgattgaacagcgtcaagagtatgaagggatgtatactgatttaggtatcgcttatcatttagaaggtgaaacggaagcagcagcttcgcttatgataaccagagtagaaagtggagacgaagatctttttattcgctataacttggcatgctatctagctgttcttggaaaaactgcttccgctcaggaagaattggattatgttttagcacacgatgaaacgggagaattttatgaactggctatggaagacgatgaactaaaaggattaacggtaagaaggtaaaaaaaaagaagctgggtttcagcttctttttttatacctcttttgcaccttgtcttttcaaagaaatggattcggaaatttccagtgcaagaatgataatggtgccaagaactaatccgttgcttaaaaaagtagtaactaaaggtggcagtgttgaaaaagcttgagaaggcaaaaacataacccctatccccgacagcaacgcaataccggcttttttcattgctttttcgggctgtttggcatgcttgaattctccaattccaagagccatcatacctgtaaaaacaggaaagattgccgcgtatccgacggcaggaggaagagcggacataatggatgttaaaggagtaaagatactcagaaaaagcaaaagacacgatgctacaataaaaggaactcggctataaagatttgtagctgaaataaatccaccggaaccggaaataggcacggcaccgacacctgaaaacaatcctccaagcagctgacttatacccgaaaccatccccgaacgcttaatattgtctttttcaattttttctcctttgtgtttataaacagactcaacaacacgaatagaagctagcatgtttgtaattaaaatgagcgtcacaaaaaaagcagtgacaaccatattccattcaacgcgaggagctccaaatacaaacactttaggtatgtaaaataactgcgcctgaaactcgataggtttagctaaccctagcattgcaaatactccccagcctacaccaatactaataataatgctgagcttatttaacgtccggtgcgataataaataaaaagtcagcagcaaaatcgcagctgaagccagcgcaataggaagtttaatagctgaattcgtttctgtaataccaaacattccttttaaaaaggaaccgctgagctgcgtcactaataaaattaaatatgtaccggtaactgtcggggtaaagtattttgctagtttatcaatgagaccaagcaggctcatcaaaatagcaattatcccgcttataaggagggtgaactgcagcacgcggagcgtttcagagtgagaaccaaatagaacggttccaagactcgcatacagagaaaagacgccccaccaaacaccagctggcccttccatgatgggatatttatgccctataaatacctgcaagagcccggataaagctaaaataaataacgttcgctgtaaaaattgaatagaatccgctgcgtttaaatgaaactgagaagcaattacaataggaacaatcatactattagaaatcataaataaaaaccattgtagtgaagcaatggaaactcgaaacattcttaacacctcaattaatgccgacgagcggctgaatgaaccaacaggctgctctattattttaccatgggatttccaatttgtaagcgatatcttgttaaaaggaagatgagtaaagtgtcaaaaaattcaatatattgttgtaaaaagaagaaagataatttataattttcttacaattataaattataaacataagaataatttataatgaactgactaacagtcaaggaaggaggaggaataagacaaatgaaactatatctgtcggttgatatggaaggaattacgggactcgtcgatcacacaaatgttctgcggcagaaaaaaattatgaaagaagccgcaaaataatgacggatgaagcaaatgcagtaatttatgcaggatttagagaacagtgctcagaagttgtggtaaatgacagtcattcgagtatgaataatctccttgttgaacggcttcatccagaaactcagcttatttcaggaagcgtaaaaccatattcaatggtacagggattagatcagacttttgatggtgctatgtttctaggatatcatgctaaagcatccatgcctggtgtcatgtctcattcgatgatatttggtgctcgcaatatgtacatagacgatacgaatattggagagttaggcttcaatgcatatgtcgcaggctattacggcgtgccagttttaatggtagtcggtgatgaccaaacggcgttggaagcacagcagcttattccaaacgtgacgactgctatcgtcaaacaggccatttcacgttctgcagccaaaacattaacccctaagaaagcagaacaattacttcaagaaaaaacagccgcagctattcaacatagacaccttgttaaacctttacttccacctaaacatccaaccttacgaatagagtttgcaaattacggtcaagcagagtgggcgcacttaatgccgggcacagaaattgagcctggaacgacgactgttcggtttcaagcaaaagatattttagaagcttatcaggccatgcttgttatgactgaattagcgacgcgcacaacattctgttagaaggtgggataaaggtgaaaagttatattttgaaacgatttttatccatgcttgttacgctatgggtaattgtgaccttaaccttctttttaatgcattcgattcctggatctccatttaatgaagaacgagcgacaagcgatgcagttcaaaaaaacctggaatcattttatcacttagatgagccgctagctgtgcaatatattctttatttaaagtccattgttacctttgactttggtccttccattaaacagccgtctcaaacggttaacgaccttttaggaagagggtttcccgtttcatttgaacttggaatggtgacgttaattcttgcggtgacttccggtattacactaggcattatcgctgctcttagaaggaatggaataattgattacatggcgatgagcatagcagttatcggattgtcggttccaaattttgttatggccacgttgttaattcaacagctttctgttaatttgaaaattttacctgccgctacgtggacgagccctttacatatgattcttccgactctagctcttgccacaggtcctatggctattattgcacgtttgactcgctcaagcatgatagaagtactaactcaagattatattcgaacagcgcgtgcaaaagggctttcaccagtaaaaattgtatttaagcatgcgcttagaaatgctttaatgcccgttataacagttcttggaacgattgcagccagcgtattaaccggcacatttgttattgaacaaatctttgctattcctggcatgggaaaatattttgtggacagtattaatacgagagactacccggtaattatgggcacgacggtcttttacagttcgattctcatcattatgctttttttagtagacattgcttacggaatacttgatccacgaatcaaactgtataagaaggagggataacgtgctggaaaaacaggagtataagcaaattcctgatgagtggtttgtgccaaagaaaaagaagaaatctgaagctgaagcagttgtaaggccgagtctttcttattggcatgatgcttggcgcaggcttgtaaaaaataagttggccatgctgggtctcttttttttagtcattctcgttgtgatggctatattcggtcctatgttttcaccctacagtgtaacgaaagcttcttttacagagcaaaatcttcctccttcagctagtcattggtttggaacggatgacttaggcagagatatgtacacccggacatggtacggggctagaatctctttatttgtaggactgatggcagcgcttattgattttatcatcggtgtcatttacgggggattctcaggctacaaaggcggaaaaacagataatgtcatgatgcgcgtaattgaaattttatatggtcttccttatttattagtggtgattttactaatggtagtcatgggccccgggctttctacgattattgtggcactttccgttacaggttggatcgggatggcgagaattgtacgggggcaagtattgcaaataaaaaactatgaatacgtgcttgcatccaaaacgtttggaacaaaaactagtcgtatcattaagcgaaacctgcttccaaatacgatgggaccgattatcgttcaaatgacactaaccgtaccaactgccatttttgctgaagcttttttaagctttttagggctgggtgtacaggctccttatgccagctggggagtaatggcaaacgatggtttatcaacgattctatcaggctattggtggcgtttgttttttcccgctttttttatttctcttaccatgtttgcttttaatgtccttggagacggactgcaagatgcacttgatccgaaattaaggaggtaagcaaatggaaaaaatgctccaaatcaaaaacttacacgtacagttttcaacttacggagggcgagttcaagctgtaagaggcgttagttttgatttacataaaggagaaacactagcgattgtcggagagtcagggtgcggaaaaagcgtaacatctcaaagtattatgaggttaattccgacacctccgggcaggatcacaagcggatctattttatttaaaggccaggatttaacgaaactatcagaaaaaaaaatgcgagacattcgaggcgctgatatttcgatgatttttcaggatcccatgactgcgcttaatccaactcttcgcgtaggtgagcaaattgcagaaaatattatgcaacatgaaaacatttcaaaagaaaaagccaaagaaaaagcatttgaaacgctggagctagtcggaattccaaatcctaaagaacgcctaaagcaatatcctcatgaatttagcgggggaatgagacagcgtattgtcattgcaatggctcttgtatgcaatcccgaagtgctaattgctgatgaacctaccacagctcttgacgtcacgatacaagcgcagattttagaattgtttaaggacattcagcagaaaacggatgtctctattgttttaattacccatgatttaggtgtagttgctcaggtagctgaccgtgttgccgtaatgtatgcaggaaagattgtagagattggaacaagaagagacatcttttatacgccgcagcatccgtatacaaaaggattgctgcgttcagttcctcggttagatttatacgaaagtgaacttgtgcctattgcaggatcacctcccgatttatttgcacctccatccggatgttcgttcgcacctcgctgtccttacgtaatggaagtatgtgaccgcatgtatcctgcgtcgacaaagctgaaagaaagtcaccaagtgcactgctggcttcaagatgagagagctcaaaaatttgtaacaactataagctagatttatagatgaatagagaacttatgaaagagggggaaatgatgaaaaaaatagggtctttactaatgatgtgtgtacttatatttgcacttgctgcctgtacggccacaaaagattcaggcgcggagccagaaaagaaaagcagtacagcaaaagaagacggtaaggtcctttatatgaataatggcgcagaacctacgtcttttgatccacctattggatttgattcatattcatggaatatgcttaataacttaatggaagggctgactcgtttaggaaaaagcgatgagcctgaaggagcaatggccgagaaatgggatatctctgaggacaaaaaggtctatacgtttcatttacgaaaagatgctaaatggtcaaatggagatgacgtgaaagcaagtgatttcgtatttgcttggaagaggctgttagatcctaagacgggttcaccagcggcatttttaggttatttcatccaaggtggagaagaatttaatacgggtaaaggtagtgccgatcaagtaggggtaaaagcgctagatgacaaaacctttgaagttacgcttaaaagccctcaagcctatttcttaagcgtagtttccaatccagcgttcttcccaattaatgaaaaagtagcaacaaaaaatccgaaatggtttgcagaagcagattcgtttgttgcgaatggtcccttcaaattaactcaatggaagcataacagtaatctagtcatggaaagaaacgatcaatattgggatgctgaaaatgtaaagctcgacaaggtaaaatgggcaattgttgaaaatacaaacacagaatatcaaatgtatcaaaatggagaactagatgtttctgaaattccatcggatttaagtgaaaagctgctgaaagatggagatgttcatatcgaagaccaagcgggaacttacttctatcgctttaatttagataaagagccctttcaaaacaaaaatatccgtaaagcatttgcaatggctgtagatcaagatcaaattgttaattttgttacaaagaataaagaaaaaccagctcgtgggttcgtatcttacggatttaaagatgcagatggaaaggatttccgtaaaacgggcggcgatttattaaaaacagatggcaaagaagcaaaagcacttctgaaaaaaggaatgaaagaagaaggatataaaaagctgccagctattacgctaacatacagtacagacgatacgcataaaaaaatagcagaagcactgcagcaaatgttcaaagaaaatctaggcgtagatgtgaagcttgccaatatggaatggaatgttttccaagaagaacaaaaagcgttaaagtttcagctgtcaagaagttcatttttagctgattatgcagatccaattaactttttagagagcttccagacgggtcattcaatgaaccgtacagcttggagcaataaagaatatgatgagttaattaaacaagctatgaacgaaactgataataaaaaacgttttgagcttatgtataaagcagaaggtattttatttgatgagatgccgatcattcctatccatttctacaactatgtgtttttaatcaaagataacgtatctggaattgttcgtcatcctgttggctatttagatttgaagtgggcagataaacagtaaagtggaacttttcgtcagaggggatttcaattcccttctgacccaagtttcactttcttcatttctttacacaaaaggagtgtgacagatgataaaaccaaaaccattacaaaaaggtgatacagtagctgttattgcgcctgctagtccgcctaatcagcacaatctaaaaaaaggaatagaatatttaaagggaataggattaaacgtagtaacaggcgcacatttatataaaaaaaacgggtacttggcagggactgatgaacagagagcagccgatatacatgcgatgtttgccaataaggaagtaaaggcaattatttgtgcatgcggagggtatgggactgctaggcttgcctcgcaattaaactacgatttaatcaagcgaaacccaaagattttttggggatatagtgatattacgtttttacatacggctattcatcagcgcacaggtttggttacctttcacgggccaatgctttcgtcggatatcggaaaagaagatgttcatatagagacgaagcaagctttttatcaattattttctcaccgttctttttgctatacggatcaaattagttcgctcgacactatttgtgaaggagaagcaactggtcagctgataggaggaaatcttactttgctggtaagcacgcttggtacaccatttgaactagatacgaaaaataaaattttatttattgaagatattgatgaagagccgtatgaaattgaccgcatgatgacacagctgtatatggccaataaactacaggatgcagcgggaattattatcggagattttcataactgctatcctaaaaaacgtacagagtcgctttcattggaagaggcattaacaagttacctaacttctttaaaaaagcctgttatgagagggttttgcatcggacattgctctcctcaaacacctgtggcgattggaagttatgccacgatgtcgacgtatgaacgaatggtggaatttgaatccggtattacattaccaaaagataaagtcgaacgctgaaggttaaacctgcggggaggagaaataagtgatagataaaaaaacgtattacgtttgtgtggctgtggcgactgtgtggacttcctatgactcttgcagagaaatagatgacaatgcaacaagtgtcccagtaaaactagataaatggctagaacaattaacgtatacacgtcggttggagctttgtgagaaaaatttagttcaaacgcagctgttactaggagaagaagtatacgtaacggaacggaaaggtaaatgggcaaaaatcgttattccttctcagttttcttctaaagatgaaagaggatatcccgggtgggttccttcccaccaactgatttcccaagctgaatattctccattgaataaaccaacggcagtggtaacagcagcgattgcgacactgcagctagcggaagaagccttacaaattagttatcaaacgcagctgcctcttttaaaagaagataaagaatggctagaggttcaaacgccggttggcagtgggaaaataaaacgtcaagatgctgttgtaatagaggatagaaaccgtaaagcaacaaaaggaactggagatgtgattattgcagcaggagaacagtttttgaatcttccatatttatggggtggcatgagtgcttggggatatgattgttccgggtttgcctatgctactcataaagcaaacggctatcttattccaagagatgccaccgatcaagcaaggcgaggcaaagaagtaggattagactctattcaacctggagatttgctgtttttcgctcatgaaaaaggtgaagggtctatccaccatgttggtatttattatggtaaaggaaaaatgcttcattcacctaaaacaggtaaaaccgttgaactgattgaattaaaaggaacgctttatgaagaagagctgtgcgcagcccggcgctattattaggaggtggcagttatgacaacgaagcatttgttagaagtaaagcagctgagcaagtatttttcgattacgaataagcaggttttaaaagcagtagacggcgtgtcttttcatatttcaaaaggagaaacctttggacttgttggtgaatccggctgcggaaaatcaactgccgggcgaacaatcattgggttgtataaccgtacatcgggagaggtgctttataaaggaaaaaatgtgcatgagctatcagagaaagagaaatttgcttttcatcgtaatatgcaaatgatttttcaagatccatatgcttcactaaaccctcgttctaccgtaaaggagattatctcagaaccaatggaggttcacggactttattcgaataaaaaagaaatgctgaaccgagtgtatgagctgctagaagacgtcgggctaaatcgtgatcatgccaatcgctatcctcatgagttcagcggcgggcagcgccagcgcataggaattgcgagagctttagcgttaaatccagaatgcattattgcagacgaacctatttctgctttagatgtatctgtacaggctcaagtagttaatttattaaagaaactccaaaaagaaaaaggattaacttatttatttattgcacatgacttgtcgatggtaaagcatataagcagtcgtattggagttatgtatttagggcatttagtagaattaacaacaagtgcggagctgtaccaaaaaccgcttcacccttacactcaagctctactgtcagctattcctatttctgatcctgacgttgaggataatcggaagcgaattgttcttaaaggagaattgccaagtccaatgaatccgccctcgggctgcgtgtttaatacgcgctgtcctcttgcagtagcagcctgtaagactcaaaagccagagtggcaggaagttgaagacaatcactttgtagcctgtcacttatataatcaaaagataatgagtaacaactatattgaaacagctgcgacaaaatgatggaaaaagcgagaatgaaaatcgaagatgcagttactacgtggaagcggagtaataatggacttatacgtattcatattgaaggaaaagaatccatacggattaattcttttatccaacaacgagcagcaagtacaatcaaactgctgcttgcaatagaagcgtttcgtcaaattgatgcgggcatcttggctttaacatctgtcattcaaagaatggaaaaaaacacggttggcggagcaggcgtacttaaagctcttccgcagttaacacatattaaagtggaagagctgcttacccttatgataattgtttctgacaacacagctactaatgagctcatttctttagtaggatttgaaaaaattaacgaatgtgctaaaaatctaggattaaagaaaaccgttttaaaccgctatatgatggacgaaatcgctgttgaaaaagggattgataattatacgtgtgcctctgatgtagtaaagtgtctaagggaaatatatgaaggaagccttttgcggaaatctagtcgcgaaaaaataatgagaatgttagaaatgcagcagtttcagcataagcttccagcacgtataggatcagcgtttcaagctgcgaataagactggagaactacagggagcagaacatgatagtgctattctcatgcgaggtaacgaaacgtattatgccgttgttttgatagatggactaagtgacaatgaacagggaaggagattaattgctgatattggatatcttctgtcatctaacatctaaaaatctcttgaccatatacttcaataagcgggattggtttgctcccttttatttaatgtcttctatcaaagaaaaacgcacatttactaataataaatgcttgtcttctcagattttggcgagaccgttgtttgctgcgctggatttgtgctagtaatagataaacatgttctttttcataaaaatttatgaaaaaataatgataaatcattcatcctataccaacttattcatattttttatataatagaataatagtatatattttaaacgaatagtgaatgtctatgcaaagcagcaaggagcatgaaattattcgattcataaatggtggtgtatgtatggcaaacgaacatgtaatgatagatattataaaagcatttaaacgcaattcaactgaatccattgccatggatttaattaaggaagtgcgagggacatttagtccattacctaaatatatagcggatttaattgatgagctgagaaaattaaatttaaaagacgaagtgatcagtgtaatcttgtatcaatctgtatatgtggcagatcatcaatttaatattaaagataccattaccaatcgtcagtttgtaaaagatacgattgaaatgggcagaagatgggtgcatcagtacggccgaattgaaacagtagaagaagcaattcatattgcagagcaagtgtctacaaaagaggacttgcctcatcatttgcaaacagcaacaattgacgaaaaaattacgcttgaggtgcagcttgatcatcaaacgtatgaaatgttaaaaaatatagcggtttattatgatcatcattcctatgaacagtcaatgactgtagcaattaatcgtttatatacgcagctgcgcgatgcacaatcaaaaaatagttaaatgtcaaatctcacatgtttcgtgcaccatgtgagattttttaagatgtgaaagaggcgcagatgaaaatgtcttgctccatcattcaccaaaaggagggagaacatagatgaggatatatttatctcctcttcaaaaaaaagatgcttctaaagtttttgaatattggtcggatgaagaggttactagatatatgaatattgagccctttacgacgctttatcaagcggaaagcatgattgcacttctccaaagtttgacgaaagaagggaaagcaacacgctatgctattcgattaaagacttccgatgagatcattggaacctgcggtctaaaccgtattgattatgttaaaaagcaagcagagattgggtatgatttaggcagacctttttggaaaaagggcctcatgacagaagcgctctgccttttgctagaaaaagcttttgaagagtttcatatacaagaaattgaagcaaaagttgatcctaataataaagattcaattactcttttaaaaaaattttcgtttcaactagaagaggcgtatgagtcagatgattgtacttgtttatacaccgtcaacaaggaaaaagtgagcgtgatattgtcaggacgttcaaaaggtaagaagtaaatcgagcataagttcttttgaaatagtaaatatttttaggccttaaccgataacaaagaaaagaacgaattgaaggaaggtcatgaatgaatcatcatacacatttactagaagggacgtacaatgagttactcgttacactctctttccttatcgctattactgcggcgtacgcttcttttgggttagctaatcgtgtaaaaatttcccgggcaaaatttattcagttttggttaatcagcggggcatttacattggggataggcatttggtcaatgcattttatcgccatgcttgcttttcacctgcccgtagatgtttcatataatttatggtttgttcttctctcaatcttgggagcaataacgggatgttatataggcctctacctcattcacaaacaaaagaaaagtataaaagcacttatcactgcagggagctttatgggagcgggaattgtttttatgcactatttgggcatgatggctatggagccaattatgatttcatatgattcatttatcgtttttctctctattcttattgctgttgctgcttctaatacagctttgtggcttggtttttattcaaagctaaatgaagggaagcttaccgtttttgctaaggttatttgttctattatgggcattgctattgcaggtatgcactatacgggcatgcaggcagcttctttttcaggaatgtcaatgtttgaacactcaaacggttttgctttaaatccaatatatttatccgtcgttattgttttttttattgtctgcctatttacggctgtgtttttaaccatttttatggatcgacgcgtacaaaaacaagaagttttaaaatgggctttttttgaatccgccttagatgctattttggtgatcgatgaaaaaagacatgttttatcgctcaattatgcagcggaaacgcttttctctcttaaagcatcagatgtaatcgggagtaatgttgttaagctgctgcccttctatgagtcttcttctctacaagatggacgaactgagcactcccttttgataagtaatagagaagttacggttgagataacggtgatggcggtaggaattgaagagacggttgagtatatgctgtatatccgcaatatgacgcaagagcgcgaagcggaaaaaacgttgattgaagcaaaaaatcgctatgaaaacttgttttactcctctccattggcaattatggtccatcgagaagaagaggtcgtgtctgtgaatgatgctatgattcagcttttaggagtaacggaagaccagctcgttggtaaatcgttatatgatttcttttcatctgaacaagttcctgatattaaaaaaggattgaaggcagtaaaggatagaaaagatgagccaagatctccattagctcagttgaaaatgtttaatgcgttaggtaaggaactcttcttagaagtaaaatctacgctcattcaaattaatggagagacgctttttcagacagtaactagagatgtaacggaacagaaaaaagctcaagaatcgcttcaatatatggcttttcacgatatgctaacagatttaccaaatcgaagtatgttttcaagcattgtagagaaatccattgattcagcagctgcttcaggaaaaaagcttcatttcttatttttagacctagatcgtttcaaacaggtaaatgacacgcttggtcatcatgctggagatcagcttatgcttcaggttgttgatcgaatgaagagctgcataagaaaccaagatgtgctttcgcgttttggaggagatgagtttttagttttactacatgataggactgatgaagaagtgaaaaaaatctgtcaatcattaaatgaatgcttatccactccttttgtagtgctatcgagagatgtttatttaggggtaagcatcggagttagtttatttcctaaagatggaaaaatacttgaagtgctagttcgccatgctgatttagcgatgtacgaagtcaaaaaacaagggcgtaatcattatctgttttatcaaaaagaaatgcaggttcatactacgcgacgaatgagaattgaagatgggttacgcaaggcttttgagctgggcgaaatggagcttcactatcagccgaaagtcaatattcaaagtggccatattgttggggtggaggctttaatccggtggactcatgccgagatgggcgtcatttctcctgcagaatttattccgattgctgaagaaacaggcgttattgttacactgacgaaatgggtattaaaaaaagcgtgccatcaaaataagtattggcagcttcaaggacttcctcccttaaaaatgagtgtgaacatatcaagtgtggattttgggacaactgattttgttgattatgtgttaggtgtcttgcgtgaagtagagttagaatcacgatatttagaacttgaaattacagaaagtgtaacgatgaagcatgttgagcaaacaatcgaaaagctacaaatcttaaaagatgcaggagtatttatttcgattgatgattttggctcaggatactcctcgttcagctatattcagaagctgcctattcatacgctgaaaattgaccggtcttttattaaagatttagatcctaatacaacggaagtatcgattgtcagagccattattacactagccaaaagtttgcagctatccgtcgtagcagaaggtgtagaagaagttgaacaagtagaacttcttcataaagaaaaatgtgatgaagtgcagggatactatttctccaaaccgatttcagcggaggaattttatgagaaatttcataaaatcgaagaaaaaatggaatttgttcattaatgtaaaaagccgttcttatttaaaagaacggctttttacatttaaggtcagagctaacagtttatacaatacatagattccaaggtatgcaccggttaataaaaaagctgaatttaaaaagattgcatgaatgctcgtcataaaaacagtatggttttttaagatacgatagatagaagcagcagctatatttccaaatactagcgctgaaagaagggctaacgtattaaaaactagctctgctcctttccatttgagtgagaaaaagagcatgataataggaataataatacttccagaaactaacagaaaaatcaatggaccatctccaatacgttatcttattacagttacatnnnnnnnnnnnnnnnnnnnnnnnnnnnnnnnnnnnnnnnnnnnnnnnnnnnnnnnnnnnnnnnnnnnnnnnnnnnnnnnnnnnnnnnnnnnnnnnnnnnnccaatacgttatcttattacagttacataagataatgtttttgcttatttttagatagtcttccctttttatagtctgttaagcttttttcttccattttttacttatataaaaaagtaagatgatggataaaaccattaaaatgattttgccttgcatagatccttgttaaatatgataaaccgaataaacttcaataaaaagcgctggaatttttccaagtgcgctagcagaaatgaataccgcaaaggagccttttcctatagcgctgaggaatgtaatgaggcctgatggaacaaagggaagtaaacgcaaagaaagaatcaatataaaactctctttcccttgtacgcgcagcagcttcagcgacttggagtgagaaggtgtttttgtatgaacaagtgtacggaaaccttttcgatacagccaaaaagagagagctgcacctaaaacttctccaataaaagaaagcaaaaatccgttccaaaaaccaaataattttacgtttacgaacgtaaggggtgcacttggaaatacgcccgtaatgctaataaggatgttcaagagaatgctgataaacccagctgcttctaaatgttcaagcagaaatgtttgaagataatcagtcatggttatactcccatttatgttttacttgtagggctattttagatgattttctactattatataatttttggcatgaaataagtaggtaagcagtttataaaaagcaaaacagggtaactacttactaatgaaagatgatttactgatttgaagggatggacaactcatgttgaaatttttgcttgttattgtagttgtattattaattattatgatttttaaacgctttatccgaaaatgaaaatgctaaactaagcagctcgtgggatctttctcacgagctcttttgcggagctattcagtagctcaacaatacactttttacctgtgatgaatatcactgcagctagggaaatgaaggggtaagatagaaatgggagggaggtatatggaattattattctatctcagcacttatttatcagggggagctatcgcattatggctaattaatgcagcatttaatggattattaaaataacagagggagagaaaatgaacgattctaaaggtatatttaacgataaagaaagaaagcttgctcgctatttggagacgtacacaactgagcagattttaactgaagcaggcatgtcttcgtctgctgcgctatatgagttgaaaaaaataagattaccgcgggcagttgctaatacgattgtttattacgtactggcaacaaataatcaaaagctggttatgtacaaactgctcatgttagctggcgtttgtaaaaagcttggcattcaagatgcacaggcagccctcacttttatcaaaaaatattacgtttgtcatcagcatttacactagaaagtacatttgtctgagggggaaaagagatgaatattgtcccgtttaagcagcgttcatctgcaaaaaacgatcaaggcagagaacagccgtttcaatgtttcattgagggagatcgatttcagttagatttgtatatgacatatttatttcatcgctgccatcctagcaggtatagatataaccgtgctaacagaaagggtaggatgtaatgataagataccagtggtaacggcttcattattccatcaggaaaaatgaagccgtttgttgtgttagaaagaatgatttactatgatgtagttaatgataaaagaaaaaggaagggaaggaacgtaatggatttacataagtgggaatattggatttcaaagctcgagcttcagcctcatccagaaggagggtattataaacaaacctatcgctccaacgatgaaatttctgataaagaagtgtcatcgcagtttgatgataaacgcttcctatacacgagtatttactttttattaaggtctcaagatgtatcgcatttccaccggctgcaatcagatgaactatggtactatcatgggggaagtcctttaaccattcatattatttaccgcgacggaacctatcaagaagtaaaactaggtacaaacttagaaaatggagaagttcctcaatttttagttccaagagatacgatttttggttcctctgtggcaaatgagaatacgttttctctcgttggatgcatggtcgcaccaggttttgatttccgtgactttgaattattcacaaaacagcagctgcttgatgaattccccgagcatgttgtgatcatcgacaaattagggtacgataaattgccaaatgattgaaaagcatgcatctcggtttgatgcatgcttttttcatttgaaccagcctttttccttaaagcgagtaatggcttcaatgcggttctttacttcaagtttgtctagaatggtagaaatataattgcgcaccgttccagtcttaatagatagttcgtcagcaatttcttttgtgttttttccatcagctactagagctaatacttctttctctctagctgtaagaggactggtagattcactatataagtcatccactaattctggagcatagaggcgtctgcctgccatcacgcttcgaatggaatttgcgagttcttcactcggactatcttttagcaagtatccgcttacgccggctttcaaagctctttgaaaatagccggagcgagcgaatgttgtcaaaatgatgactttgcagtttaaatctttcagttcctctgcagcttcaagcccagttttaagaggcatctcgatatccattacgcatatatctggctggtgctgcttagcaagtgatacggcttgttccccatttgaagcttttccgacaacttccatgtcatcctctaaatttaacaaagagcctaaagcccctaacatcatttgctgatcttcggcaatgacaattcgaatcataattgttcctccttaatatgtttaacgatgtttggaactgtaatatgaataatcgtccccccttgactggagatatcaagatggccgtttacaaactccagccgttctttcattcctaaaagaccgtttcctttccagcaggttttcttcgtattgataccaattccattgtcttctaccgttatgcctacttcttttgcagactgatgtaaagtaatcgtgcaaacggtggcttgactatgtttgaccacattggttactgcttcttttaagcacatgctaagaatattttcaatgagcaacgatacattctctaatgaaatggcctcttctcctacaaacttaatttcggcagcttctaaaagctcttgaacgcgttttagttcttcactaaggcggattccacgcatttgagaaaccatgtttctcacttcattaagagccgtgcgcgctgtttgctggacatcttttaattctgattttgctttttcaggatcttttgtaataagttttcttgctaaatcactttttagaccgataagagacagcttttgtcctaacgtatcgtgcagatcgcgagctatccgctggcgttcttcctgttttacaagctcagaaatacgtttatttgcatcttcaagctgttcttccagacggtctcgcttcttccgattataaatgctaaatggcagtacaatcacactgatggaaattacaaaaatgaaaggcagctgttttaaaaagatctcctcttgcataacaacgttaaagtttacagaaataacggtgctaattaaatgaacagcatacaaagtgaagaaagcgagtcgtttttggatatttccaataaaataagcgataaaaaaagcaaagtaaaaggcaaagtaaatataattgaaaatagttgtcagggctaaggaaataacgattaacaaagccgtccatacgtaaacggacttgcctgttgaaacaaacgcaaaacgatagaaaataaaaaataagatggtgagtaacgaaccaacaataatgtgattcatggatgaagactgtaaaataaaataaaatggtagaatgacaaataccgtccatatgtaaggagatagcccagtgattttttggaaaaacgtatattttttcataaagaacctcgtttacttgttaaaatacactattagtttaccacaaagtagaacgaaataagtttagagagatagataaaacagtcaagcttttgaaagcttgactgttttgttttattttattaaagttctgcttttgtttgagatgaaattctgcttgcttttggtgcagctgagcgtgtttttatttctttaaagctcacaaacattttgttttcttcatcccatagacggaatcgaagagagcgaagacttgttgcgagtgtaatggttggtacattttgaagaggctgtgtgtgttgatgaacagcttcaagcttatagttgggcactcttgggcttaaatgatgtacatggtgaaacccaatattgcctgttagccattgcaatagttttggaagcttgtaaaatgaacttccttcaacggctgcttttacataatcccagtgctcatcttcttcaaaataagaatcttcaaactgatgctgtacataaaacagccaaattccaattgaacctgaaatgaagaaaatcggtccttgaattaataggaacgcctgccaacctaccaaccagcaggtcgctgctgctaatgcaacgatcaatacatttgtaagatacgtattcattctttcttgtttcttcgcatttttttgattgaatcggttcgtaatcaaaaatacatatataggtcccacgccgaacataatgaacggattgcgatagagacggtaagcgatttttttccaaatagaagcttctttatattctgttacggttaacacccaaatgtcacccgtacctcttttatctaagttgctgcttgttgcatggtgaattgcatggctatgtccccattgactgtaagggaacatcgttaagacaccggtaatggttccgagaattttattgtgttgtctactcttaaagaaagaatagtgacaacagtcatgaaaaataatgaatattcttactaaaaatcctgctgcgataacagttagcggaaatgctaaaaaataagaaattgaaaggctctcataagcgagaaaccacagtgtgaaaaaaggtaaaaaagtattaatcaattgtcttatgctgtctttcattactgctttttcaaaaggtgcaacttgttttcgtaaatttttttgtttttgtatagtcatatgaaattcctttcatcaccgtatattaccctcagtataaagagatttttctgactatttaagacatacgtgtcatatagaaactatgacagttgtcatatatacgtagggggaagctgtaaaaaatgaaaaaaagcggtatttaacagtctgcggttctgataaaattatacagtgaaggcttattgctacggagtatttaagaagaaaaaaggagtttgaaatgaataaaagaaatagatgggtatatcttcttctagcttttgtgatcatgggagcaggccttttatcaagaaaacttaccgcgtatcttcctcacatcgtaaatatatatgcgggagattcgttatgggccttaatgatttttgtcagcgcgggtttttcgtttcctgcatggaggacaaaaatgattggtatgtttgctatagtgttttgttacttcattgaatttacacagctgtatcatgctcggtggattgatgacataagaaagactccgctaggagggctcattctggggtatggcttcttatggagcgatatactagcttattcgattggagtcggggtaggaatgagctgggagtattatagacatcgatttaaaagatccgcctagcaaatacggttcaacgaatcttagaactcagctgaggatggaataagccgtaaggttatgaagcaggacgtatatacataaaaataaatttatgcataaaaattttttacttaaaaccaattgtctattcgttgaaggagaggaagagaggggattatttgaacttaatagcctggatgattattgcatgtgaaatcgctttttggatagtcatcgttttaggattagcagcaaggtatatgtttaaaaaacaaaagctcagtttttttattttagctctaacacctgttgttgatttttttcttctgattgtgacaagcatagacctttacggaggtgctacagcgacgtatgctcacgctattgcagccgtgtatattggaatttcggtcgcttttggaaaaagtatgattcaatgggcagacgaacgctttcaatattatgtgatgaaaagcggagaaaaacctcgtaggcgctatggaaaagaatatgcaaagcattattttaagtcatggctacagcatcttgttgcttacgctattggagcagctcttttagcggcgatgatgtatatagtaccaaatggaaaaaccaacgtgctgaaaagtgtagtggaattttggacagttattgtaggaattgatttcttattatctctttctaatttcgtttggcctaaaaaagaaaaagagtccggttataccaactcataaaaagacatcgtcatgcgtgtaaaacaaaaaacctccccgtaaggaggttttttgttttaccatccagggtataggtatatgaatgatgcttgtctgaggtagttcagtttagttgcttaagcggctaaactgctttttgtgcaaatctatgtacaatttatgtagcgtgcatgataagaattctgtgtattccatatactacctcatatgaaaggtagacaagtgatacaatacagtttgtttttaggagagcttttatgaaaaaacgccggttggactttatttttttatttattattttactttccatttatgctttcttttttacctctattgatgttcattggaagtatgccttagttggattatatggggtcatcattttcatttgtatgtattcacttatgcttgaaaatcgaacgcctgaaagtacgttggtttggatgtatgtcctctttttcttccctgttgcaggctttttcttttatttgtattcaggacagctctatttaaaggggcatatgtttaaaaaaaagcgtatgcataaccgagagatgcttagaaagatggcagacaaagaaacgacgcctgatctatcgccgcttcaatcgcaccagcgttactttgctcagtatcttcaatgtgtatctttgacgaagatgaatgttcatacaaaaacctacgtccttaagaacgggcaagaaacgtttaatgaaatcaaaaagcatttgcagttagcaaaacagtttattcatatggaatactatatgtttcactcagattctctaggaaaagaaatcattgatattttaataaaaaaagcaagcgaaggtatagaagtgcgctttacattcgatacaatgggaagttttacactatcgggttcagatattaaacgaatgaaaaaagcgaatattaaagtgcatcctttcttacctattaagtatggatttttcaatcaaaaatttaactttcgaaaccaccgtaaaatagtcataattgacgggcaagtaggttttgtagggggattgaatgttggggatgagtatctaggaaaaaacaaaaaaattggtttttggagagatactcatctgatgctaaaaggagaatctgttcaaaccttgcattcgatctttatgttcgattgggaatacgtttctggagaatgcttaattaacaatgaagtgtatacaaagcctcatcctgtcgaaggagaaggctttgtgcaagtggtggcgacagggccggatacgcaggaaaatatgagtgattattactatactatgattacaagcgcgacgaaatcaatctggatttcaactccttattttgttccaaatgaagccataagaaccgcccttcgtattgcggctagaaaaggtgtagaggtacggattatggtaccagaaattaatgatggctttctgactcaatatggaacgaggtcatattttgctgaacttcttcgctgtggaattgaagtatattcgtataaaaaagggtttttgcatcaaaaaattgtgattatagacggagacatggcttcggtcggtactgcaaatatggatatgagaagttttcatctgaactttgaagttaatgcatttttaattgaaggagagacgattcaaacgctcatcaaaaattacgaagaagatattgaagacagtcatttgatcaaaccagtagcattttacaaacgaagcttagtagaacgttcgaaagaatcatttgctcgcttattttcaggtgttttataaaataaagtttgttttcaaaaagcaggaggaaacgtatgggtgaatctccatttgttaaaaaagatacgtttggtcgaaagttacatcgcttaaaagaacgtactaagccatttgtcgtgcgtttttcacggtttggtcatgtggctcaaggtgtggtctattttatcatcggtatattagcaattcagacagctttcggattaaaaggcgatttagttacttctcaaggagccctacacaccattgcaaagcagccgtttggatttttaattttaattattttggcagtaggtttaagtggatatgcgttttggcaaatcatttctgctatttttgatcctcaccacgttgggcatggcgtaaaaggcgtttttactcgtttaggctatttagtggtagccacgttttatattagtctttgtgtgagttcggtaaaaattttgcttcatgctcacgttcatacgtcaggtaagcattatcaaacggtatcagccaagttgttatcttatccctttgggcaaactatcattgcgcttacaggtatcggcgttattatctttgggattggacaagtatattgggctctttcaggacgcttcctaaaaaaactaaagaaaaacgaaatgtcaaaagaagagtggcgatggagcgggcatattggaaaaacaggtattattgctcgaagtatcgtctttggcattattggcttctttctgattcgcacggctcttcaagcagatccagacgaaacgaaagggttagatggagcccttgctgaagtagcacagcgtccttttgggtctgtactgctggcaatcgtatcaatcgggcttatggcatacggagtatatatgtttgcagaatcaaggtataaacgaattgatccttaataaaattaaaaagatgaaaaagctactttttggccttctgctcatatcatatagcagatagataatgaacaggaggagaggcagatgccatcggtagtaggagccgtaaatatctcaaatgtattggtttcatcttcagtggagtttggtgattgtctggctattaagccaaagagtacagcttttacaacagtcggttctggcagcgggaacacagggaattttatgaatattacaagcagtaccagtaccgctaatacaattgatatggatattaaggatcaaaatgtagtgggaaatgcataagaaacgaaagcttatcgtcatcggacggtaagcttttttatttgaatttcacgtatacccagacgtttctttaccacaatgtacctctaggattctatcttataggagtagtaaactagacaggtgatgtcaaaaagtggggaggcgaaattataaaatgaagaaaatatgtatgagcctgatcgttctctgtcttttcagtggaggattggccccgatgagtaaaggagccgctgcttcttcagtgggcactgtcaaaggtgacaacgtaaacgtatatcgttctccttccttacattcttctgttatgcaaacagtgaaaaaagaagaagaatttcctgtcatttcatctgaagctggagatgcagctcaagttactactcatacggtagtgccgggaaatacactatggctactagctaagcaatacggtgtaacagtcagtgatctaataaaacaaaatcagctaaaaaagacggagctgattccagggcaaacgctgaaaataccaccaaaaggcttgttacataaagtagtatcaggagatacgctttggaaagtctccgtaaagtacggtgtaaaagcaaatgaattaacaaagttaaatcagctatcctcaacaaatattaagcccggacaaacgcttattattcctgattactatgtacaagtacagcttttggaagggaaaaagggctggatcaaaaaatctgatttagtgcaaaagaagcatcagcctgtagttatgggttggagctttaatgaaaaaacagcaggctatacagaatcgatgaagcaaaagaatttagacgttgtttcacctcgtgggtttacgctaacgtcgaatgacaaagttgtttcatcttctataaatgaatcatatgttcaaacggctcataaaaacggcaaaaaagtctggccgcttattggtaacaattttgatgatgtacttacaagtgatgtgctaagcaataaagcaaagcggaaaaagcttgtatcatcaatagaaagttcgctagtaaaaacaaacagcgatgggatcaatgttgactttgaaaacattaatattaaaaacaaacaagattttgttttatttattaaagaattaaaagcagcgttaaaacctcatggtatgactatttcagtagacgtaacaagagaaaataatgatcctttttggtcgggaagctttgataggaaacagattggtcaagtggcagactatgtcattatgatgggatatgaagaacactggggaggaagtcaggttccaggatctgttgcttcactgccttgggtgaaagaaggcacacaacttcttatgaaagatgtacctgcacacaaaatccttctgggagttcctttttatacgcgagaatggaaaacggacctatcgaccaaaaaagttgtcacaaaagacttaacgatgaaagaagccgaagctgttatctcttctaaaaagttagctaaaaaatgggatagccaagcctcacagtactatgtagaatacacggaaaatggtacgaagcatcaaatatggctcgaagacaaagcatctatgcagcgccgggttaaattaattaatgactatcatttaggtggggcggcagcttggtatattggttcagaaacctcagatatatgggagttatacaacttttaaataaaaaacacacctcttgcttgatttagtgaggtgtgttttttatttgcatcataatgaagcgcatacatctatttacaaacgagataaattttacaatatttgtttttcttgagttaatttataactatattccaaaatgagcctatttaacctttttttagttgaaaacgcttaatgactttacgataaagataatttatagtaaattcagtttctatacaataaatttactaaatgaacaattaagtaatttaattattaattaagtgaaaggaatgaatattatgggaaaagtattagtaataggctttccaggtgaagggcatgtgaatccttctttaggaattgtaaaagagttgatgactcaaggggaaaaggtcgtctattacggcattgaagactatgctgaaaaaattcggaaatcaggcgcggaatttcgtgaatacgaagattttcgtccaagtcttgatatgagcaaccggatgacaaacgaagagtcttatgaccgctatgaaataatgaatttgtttttaaatgaatctgaaaatattattactaaaattatgagtgaaacgaaacatgaaacatatgattatgtactttatgattatcaccttttagcaggttccgctgtggccgaccttcttcagcttccgaaggtttctctttgtacaacatttgcgttaaataaggagttagcaacttgtatgatgccaagtggtcaaacagaacctgaccaatcttccttttatcctcaattcgaaaaatcattaaataagttcaacaaccaatataatactcagttaaaagattccattgacattatgtcgaatccaggggatattacgctagtatttacgtcagaattctttcagccaaacgtatctgaatttacgagtgagtacaagtttattggtccttcaattgttaaacgattagacattgaagatccttcttacttacaaaatgaaaatgaaaaaattatttttgtttctatgggaactatttttaatcagcagctagaaatctataacttatgtgtagaagcattaaaagattttgagggtaaagttattttatctattggtaaaaatacaaaacctgaagaattagcacacattccagaaaacttcgttgtgaaacaatacgtaccgcagctagaaattttaaaacgtgcggatttattcattactcacggcggaatgaacagcagcagtgaagggttatactacgatacgccccttgtcgttattccaatggcagtggatcaatttatggttggcgatcgcgtgcaggagttaggagcaggtgtaaaattagataaaaataatgtatctgctgagctaatcaaaaagacagttaacgacgttttaactactcacacatataaacagcatgcacaacaaattggagaatcacttcgctcagcgggaggatacaagcaaggagtgaaagaaattttcaatgtggtgcctgtcaaagcgtaatagatgtaaggcagctagataactaacagagaggagtaaatataatatgcagactataaaaaaagcagttataccagcagcagggttaggtactcgttttttacccgttacaaaatctatcccaaaagaaatgcttccaattgtaaataaacccgtaattcaatttattgtagaagaagccttaaaatcaggaatcgaagatattttaattgttacaggaaacgggaaacaagcaattgaaaatcattttgatcacaatattcagctggagcacttgcttcatcaaaagggaaaaactgaactattagaagaaatggagcatatctctgaactagcgaatattcattacgttcgtcaaaaagaaatgaagggccttggccatgcaattggctgtgctcgacagtttattggaaacgaaccgtttgcagttttacttggagatgatttaacagacccagatcagccttgtttaaaacagctgattgaccagtataaccaaacgggatcatcggttatcggcgtacagcgcgtagaggaagaatccgttcaccgttatgggattatagatccaaaagcaaatgaaaaccggttatacgaagtgaatggttttgtagaaaaaccatcattggaagaagctccgtctaatttaggaattattggacgctatgtatttacacctgacatttttgattatcttgaaacgcaggaagctggaaaaggcggggaaattcagctgacagatgctattcagcgtatgaatatagaccgttctatttatgcttacgaattcgagggcgaacgttatgatgcaggagaaaaattagattttatttttacgactcttgcttttgcattaaaagatgaagaattaaaagcacctcttttgaccaaattcaaagaacttatcagcaaagaagaacaaaaagaaaaaattgctgtacaaattggaaaataaccttcatttacacacctttcttctaatttttcttgaagaaaggtgcatttttttgcggaaatggaacgtttgacagctggatagaaagggttgaaatgagtttatgtcgaaaacagaaaattcgtttgtatcaggcataaagattgtatttacagaccgggattttcgaacgatttttatttcattatttattattggattatctgttggcggctttatgccttatttaacggtttgggcaacaaatacattgcatgccacttcttttcaagcaggatttttatttgtgccaatgagcattattggtttagtcgtatcgttttatttagcttcgttatcagacaaatgggggaaacgaaagccatttattatttgggcgttactgattggaaccatttcaagaatgccgttagcgtttacgcattcttatacaatagcactcgttttacttgctataggagggtttaatgcgttctcttttttctttgccctgctgaatgattttattgttaaaaagcaagaaagcaaatcgcaggcaggtacgattactggtaccgtgcgaatggctttttcacaaggctatatttttggccctatgcttggcgctttaattattgaccacggagggtatactcttttatttttattatcagggttgttatcgctagcaactttagggtgggttctttttgcgcttaaagaagacagtatgcctcaaacttcagttcatggatcttcaaaagcgccagccggtataccttctgtattaatagctgtattcgtagcagctcttttcatttttgcgggtgattccgggcgttctatgtatttgccactctacataacggatacgttaaaacaatccgtttcgattgtagggattctctttactgttacatctgtttttgagctagtatttatgccgttagggggctatttttctgataagatcggagttaaacgattctttatcattggaattgcttgccaagtgctttattttattttaacgagccttcatttaccgctgagtgggttaattgtgcttcaagtattttatgcttttattctgtccgctacaatgggagtgggaatggtgtatgctcagtcactctctccgcgtcaaattggactagccacaacggcatatatgaccgctatacaaacttcagcagttgtcagtagcttagctatggggtcgctagtcagcgtgattccgctgccttctactttttacattttggctgttttctcggttatttcaggtgtgatgttcctgtttatgaagcaaaaatcagctgaggaaatgagttgaaaagaaaagttaagaagaggttgagacattaccaaattaattcaatctaaaggcggacaaatagtatacatgagctggactgcttgtgccaccgcagttgatttccgtacaagtcttcgctttccgcgggtggcggatgagcctcctcgtcgcttgcgctcctgcggggtctcatctgttccacttttcccgcaggagttttcgccttgctctccaatcaactgctagaaggacctaaacaaatgacacatacgttcaccataacaaaaaaaacgaaccattgattaatggttcgttttttttactttctctaaaatatttttgcccccgcctcttttttatgaggctgtttcttgaatttgttcgctgcgatttttatttaagattttgcggtagcggtaattaacaaaagctgccgctgccatacctactactgagagcatcgcatcaaaaataaagataattgaaatatgtcccgttttagacatgagccctgttgctaaaggcaataaaatagcagctaatccagcagccgtcgcgacaattccggtaaccgttccttttttgttccagaaaagctcggtcataacagtaatcgctaattgaaagaccccagccgtagaaaatcccatgaaaaaagcagctgcaattgcaatagcaggtactttaacaaaaagaagcgtaagtacggctataagggtaatcatcgggtaaacgagaataaccgttacaggacgaagcactttgcttaataatacagctaatactaaaacagagattaaagctccgatgctgtagtagcttaaaaggcggactgagctgctttcagccatacctaatacttgttgaccataagtagggagccaaatttgagccaccgtaaaaagcgctgtagaagtaaatccaatcacaataagagcaattccttcttgtttcattttaggagcagagataaatttattctctgctgtatttagctgttgaactgtactctgttcgcgtttatgattgggaaaaggcagtttgaacataaagatcatatttagtaaataaataagagcaggaagaaaaaaagcatacccataaaacaaatcacgatctgcaaaaaaggcaatcataaacggcaaaagtgccgctcctgcagaaataaatgcttttacaagaacactggctgaacctgaagatttaggaaagacctcaatcaaagcagggtacgttccagcatccatagcagagtttgcaataccagcgataatagcaaagataaaggctgtttgataatttggcgataatggaatgccaattaaaaaaatcgccatcgtcagagacgaaacaataatcaaaggctttcgtccaaccttatcagacaagacgcctgatagagaatacgaaagcaattttccaattccgatagcagaaatgatatagctgattccagcaccgtcggtatttaattgttttgtcaaaaatgacatatttgatgcaagcatgatattgaccatgcccagtagaaagtagttaatatacatacctgaagctgacagcatgtacttatttttcatcgtttacacatccttacgtaaaaaagcttatatgaactggataaaagtaatcacccgttcctccttttttcttcgttatttataaacctacttccatgataagtttatgaagacattacctttatcttttatcattacatctatttcgtcctttttagtatgtgactaaatgcctagtgcttcaaatcaatatgaaatctattctaacatgtttttagtgctttaaaccaaaaaagtgatattttataaaaaaatcctgtcttcttttgcggattcacaaaagaaacccacaaaaaatgttcactttaaagccaggctgcacaagaagtgcctcctagtagtggttattaaaaaggagaaaagggtatttataaattaaggaaaaagaaacaaaagaagaaaggtggaaacaatgaaacacaaagtattttttgatgcgcaatgtcctttatgttacaacgtaaaaaaaataattaaagcgctggactggaccaaccgaatccagtggattccagttcaatacattgaacgaacggagtatagttacttaaaagaagaaggaagagacttatatgatcaaattcatatggtgaccaaaaaaggagaagttctagcaggatttgaaacggtcagacgccttttagctgttttgcctcttacatttccaataggtgtgcttttgcatttaccattgatgaacaaagcctttagcccgctatacaagtgggtctccacaaaccggtacgactggtttgggcgctacgattctccgcgaaccacataaatatataaaagggacaagctttgaaaaagcttgttccttttgttttgaagacattatactttatacatactttaattttaaaaaacgttaatttagtgtgacttagacgcgtaaattctagaaaaacagctatagctgaaagggagaacttatatgataacaaaatggacagctgaacgaatgcccgatgtaacgggaaaaacagcccttataacgggaggaaacagcggtattggatttgaagctgcaaaggctctagctgcgcgcggagcagaaatcattcttgctgtacgtaatgaagcaaaagggaaagaggctgaaaagagaattaaagcggctaacgggaatgctaaagtgacgattatgtcattagatctcagtgacttgatctctattcgacatttcaccaatcaatttcttcaacaatactcgtctttgaatcttctcattaataatgcaggcgtgatggtgccgcctcacagcaaaacgaaagatggatttgaactgcagtttggctgtaatcatttagggcattttgcattgacgggtttgcttcttcctttgctaatggaaactccacattcacgagtcgtaacggtaagcagtatagctgctaattctggagaaatctattttgataatctagacggggaaaaaggctacagtccaatgaagttctatagacaaagtaaactcgccaacctgttgtttgcaaaagaattgcaaaaacgtttagaagcagcgggatcaacgacaattagtgcggcggtgcatccaggcatttcgaatactaacctattatcacgcggttcaggcaaagagccaaacgctttgttgaagcttttggtcaagctatttagtcaatctgcagaaatgggcgcgctgcctaccctttacgcagccactgaagcaatagaaggcggtgcgtatattgggccggacggaaaagatgctaaaaaaggatatcctgtaaaagatatgatgggagacgttttatttaaaccggacgtagcagaaaaactatggagcgcatcggaagagttaacaaaagtgacatatatattcaagaaaaggtaaaaaccagcggctattggtcgctttttatctttttttgaatcaaaacattataacgttatatttacttatttaattctttatgttattctacatttgtaaaagcagaaaaataattaacattagtgtaagcgtcatcataaggggagtgaacgaaatggagaatcggtttctattacggaatgtcaaatcggtcactgaagaagagtttgatattgttatagaaaatggaaaaatctctgagatagcaaaagctggtgaaggaaaagcaccgcttgtttatgattactcaggaacctacatatcaagcggatggattgatttacatgttcatgcatttccagatttcgagccgtatggagatgagatagacgagataggagtaaaacaaggagtaacaacacttgtagatgcaggtagctgcggtgctgatcaaatagcagatttagttcaaagccaatatgcagcaaaaactaatttgttagcgtttttaaatatttcgcgtattggtctaaaacgcacagatgagctttcaaatatggagtggctaaaagcggaaaaaattttggaagccatgaaagcatatagaagcattattgtaggtttaaaagcccgtataagtaaaagtgtagtaggtaaaagcggtattgagcctttatattttgctcgaaaaatgtctagtgaaatttcacttccattaatggttcatatcggatctggccctcctgctattgaggaagttgtttcgattctagaaaaaggagacattattactcactatttgaatggaaaagctaataatctatttgataatgaaggaaagccgcttccactcctaatggaggccatccaacgaggtgttcatttggatgtagggcatggaaatgcaagcttttcgtttcaagtagcagaagctgccaaaaagcataatgttaaattcgatacaatcagtacagatatttatcggaagaaccgactaaatgggcctgtatatagcttagctcatgtattatctaaatttctttatttaggatacagccttgaagaagtagttaatggtgttactgttaatgcggcaaaatggcttaacagacccgagttaggaaggatacaagttggagaccgtgccaatttaactctctttactatagaagacgagcctgttctgtttattgattccgaaggagagcagagagaaggtaagcaaataattaaagcaaaaggagtagttgtaaatggaacgttcattgaatgctaaatatggcttgaaacgagtaattaatgcgagcggccgaatgagcatcttaggagtatcagcaccaactgatacagtaatggatgcaatgaagcaaggaggacaaaattacgttgagattgctgatttagttggtaaagcaggtgactatattgctgacattctaggatcagaagcagctgtggttgttaactcagcttcaagtggaattgctctctctattgctgctcttgttacacaaggaaaccgccgtaaaagcgagcgccttcatcaagaggtcatctccaaaaatgaaattattatgctgaaaggtcataacgtacagtacggggccccagttgaaaccatggtttatttaggtggcggaaagcttattgaagttggctatgctaatgagggtagagcgactcatattgaagaagcgatttccgaaaatacagctgctatcctttatgtgaagtctcatcacactgttcaaaaaaatatgatttctgtggaagaagcgtgggaagttgcacagaaaaataatattccattgattgtggatgccgcggcagaagaagaccttcaaaagtatgtaaaatactcagaccttgcgatttatagtggttcaaaggcaattgaaggtccaacatctggaattgttggtggtaaacgtagctacattgaatggttgaaagttcaattacattgcattggaagaagtatgaaagttggtaaggaaacaacgtttggattacttcaagctcttgatgagtatcgcgagaaaaaagataaaagtgaacaagaaaaagaaagtttacaagcattgatgtcattaaaagatatagaaggcgtgaatgtgacaattgtacaagatgaagcaggtcgagctatattccgtgcacgaattcaaatcagtccagaacgggctaatacaactgcgaaagaggttgtaaaagagttgtgtgaaggtgaaattgctatttatacacgcgattatgggataagacaaggatattttgatatcgatcccagacctttaaagggcgacgatatacatgtaattgagtctagaatacgcgaaattgtaggaggaaagtgacatgtcaaacattacaaaacgtttttataaagagcgcgcagcgttaaacgtattagcaaacagtatcgaaaatgccaaagaagtatttgaggctgcagaagggcatgtcttagtaggcgtgttatccaaggattattctactgttgaagaagcagtaaaagcaatgaaagaatacggaaaagaaattgaagaagcagtatcaattggtttaggcgctggagacaatcgtcaggcagctgtagtagcagaaattgcaaagaattatgctagcagtcatattaatcaagtatttcctgctgttggagcaacacgtgctaatctaggtgaaaaggatagctggattaatagtttagtgtccccaaccggcaaagtcggctatgtaaatatttcgactggcccagttagtgcagcgcatgatgaacaagctattgtaccggtcaaaacagctatttccctagtacgtgacatgggaggaaacgcgctcaagtattttcctatgaaagggttaagctatgaagaggaattccgagctgtggcagacgcttgcggggaagaaggattcgctttagagccaactggcggaattgataaagaaaactttgaaacaattttgcgtattgctttggaagcagacgttccaaaaattattccgcatgtttattcgtcaattattgatcagaaaacaggaaagacaaaagtaaatgatgtacgtgagcttcttgaaaagatgaaaaagttagttgatcagcatggctaagaattttgcagcatttggagaggtaatgatgcgtttacaagtaccaggatatgaattactttctcaagctcatacattaagctattcgttttctggtacaggggtaaatgtagcggcggggttagctaacttcggatatacgggatatttgatttctgctttaccggataacgctgtgggagatgcagctgtatcttatcttaaaaagttaggtatttcacagtcatttattaaacgcagcggaaaacatgtcggtatgtattttttagaaaatggatttgggtcccgatctagccgggttacatataccaaccgtttagaaagcagcttcaacagagctcctgaaggcatatatgattttgagaatattgcggagaaagtagatgtgatgcatttttgcggaatctctctggcaatgaatgattccgtccggttccatatgaaatcatttgccaaagcggtaaaagaacgcggtggtatggtcgtatttgactgtaactaccgtccgtctctatggggagatggaggatatgaaagcgcaaaacctcattatgaagatatgctgtaccttgcagatatcgtaatgatgaatgaacaagatgctatgcacattcttaagatggaaacagaagaaacaagcagaagagagcagctgatgaaactaattccaaaggtggcaaagaagtacgatctttctgtcgtagccggtacgcaccgatctattaataaggacaataagcactctttgtgcggttttatatataaaaatcatacatttacattttctgatacgattactttttctgtctatgatagaataggcgcaggagatgcctatacaagcggcattttatatggcgagttagagggcttttcgacagaaaagactgttgcattcgctgtaacagcgggaatgcttgctcatacaatcgtaggcgatactcctatgtcatcccagtacgatatacaaaaagcgatgacagaatcagtaggcgatgtagaaaggtagaggatgtaatagtgaacgtatctcgaaaaaaaggaccattgtatttgcaaataaaaaatatcttaaaagatcgaattttgcatggcgtgtatcccattcaaacaaatattccttctgaaccgcagctggaagaggaatttcaagtaagtaaaattacggttcgaaatgctattaaagaacttgtgaaagatggatatttagaaacaaaaagcggtaaaggaacaaaagttattcgaaatacatccatttcaaggctgtcaaaaggaaaacgctttaccgaagtgttggtggaaaaagggcatatcattcaaaaaaggctgcttggggcagagacaattgaaaatgcaccagaaacaactttatataagctgttcggtgagcaatgcattcgaatagaacgtctttactatttagataatgaaccttatattcattacacgcattatttaaccatgcagcgcatggaagggatagaattaacacacttaaatgcacaatcgttatacgatttgattgaagaacaggatattacattggagaaatttcgagatcagtttgctgttgcaaaagctgattcttatgtaggcgaaagactgaatgtgcaggccggagaagcgctattaaaaagatcacggtattcatatgatgaagaaggaaatatcatcgaatacagtgagggctattataatacagagatgcagcaatacattgtgaattacgatatttaagaagtgcgagaagaatacatattcttttcgcctgaaaaaatgagagcgtttactaaatgggggaaaagaggaatttagtatggatatgtatctattgcttgtgacatgcctagccattgttattgttgtattaggggtctcttggtggaagtggcacgcttttatcagcttaaccgttgccagtttatttctggctattatgtcagggctttcaatggacaaaattgtgggagcttatgaaacaggagtcggcagtgttttaggtcaccttgttggaatcttggcgcttggaacgattttaggaaaaatgatgtcagactcaggtgctggcatgcaggtcgcggagttttttattaggttttttggaatcaaaaagttgccgtgggcgatgctctttgctggctttataataggcattccggttttttttgaagtcggaattgttattttactgccgttagtaatttctattcataaaacaacaagacagaatattctactaattgcactgcctgtaattgcaggactatcgattgtacacggtctggtgcccccccatccaggagcgatgacagccattggaatatataatgcagacttaggaagagttttgctctattcattggttattgctcttccagcagcaatagtagcaggtcctgtattcgcaaaatgggtgcataaacgtgtgattcctgaaggggaacctgaattaattcgtgtcagcacttcatctgaaaaattacctaacacaggtatttcatttttcattatcttattacctgtgttattaatggtgttatctgttatggctccgtatataccgctttctagctttttaactaaattttttgtatttatcggcagccctgtcatcgcacttttaatttcttgctttgccgcattttatcttttgggcatgcgtcagggaatgaagaaaggtgtgattaaaaaattagtggaagaatctttacttccggtcggatctattattttaattattggagctggagggggatttaaacaaattttaattgatagcggtgtaggtacatcaattgctcaaatgtctgagcaattatcgctttctcctattgtcttagcatttatggtagcaggattaattcgtattgctacaggatcggcaaccgttgcattaacaacagctgcgggcattgtttcaccaatcattgtgcatatgtctggagtcaatctggaactgctggttattgcgacaggagcaggatcactaatgttctctcatgtaaatgacgcaggcttttggctagtaaaagaatatctaggtctaacagtaaaagagacgtttaaaacatggacggtactagaaaccctgctttcgtttattgcttttggaggcgttctattatttgatgtttttatttaaaaattgcctccttctgattattttggaaggaggtttactagttgacttgaaatatagtatttgtagaataaggaggcaatgtatatgacctggttaaaagaaatacttggaacagaaaaagctattattgctatgtgtcacttgttaccgttgcccggagatccatattttaataatgaaaaaggcatggactatgtggtagaaatggcaagaaaggatttgcatgctcttcaagaaggcggagtggatgccattatgttttcaaatgagtttagcatgccatatttaacggatgttaaaacggaaactgtagctgcgatggcccgaattataggtgaattgatgtcggaaattaaagtgccttttggggtaaatgtattgtgggatgctaagaaatctttggatttagcggctgctacaggggctaaatttgttagagaaatttttacaggcgtatatgcaagtgattttggtacttggaataccaacgttggagaaacaattagacatcagcatcgaattggggcacaaaacgttaaattattatataatgttgtccctgaatctgctgcgtatttggctgagcgggaaattgaaagtattgttgcatctacggtatttaataatagaccagatgcactatgtgtatctggattaacagcaggggccaagacggacgtgcagttattaatacgcgtaaaggaggctgttcccaatacaattctacttgttaatacaggagttaatttcactaatttcaaagaacagttatctattgctgatggggcagttgtaggtacaacatttaaatacgacggcaaatttgaaaaccatgtggatgttgatcgtgtaaaaaaattcatggacaaagtaaaagtttttcgtgacaatctttaaatgaaagaaggggtaaagatgaatcaattagcttttatttttgatatggatggcgtaattgtcgacagtgaacctgtataccgcatccgtaataaagatatctttaaaaagctaggaatagaagtagatgaggatacacagctcaatttcattggaggaacagctaaaagaaaatggacaatattaaaagagcaattttcactgtcctcacccaatttggagaatacaaactatctggtcaattaacttttattgtagcaacgatttaataaaaaacgagccttttcatattaattagaatcttaactatacaaattaaacgtaaaaacagctctgtaatcggagctgttttttgttgcctgaaaagctgtttgttagagatttaaataaaaaaagaatgttggatagcataatgataagtaaacgtacaatgagtatgttctcttttgaacaataaaagcactcaataaagctgaagaagcggagggaagtaacagtgcctgacaaacctagtattacctcaagtgaaattggaacgctgtggatgacatatcagcagaaaacgttaattatttgcttgttagattatatgattgaacatgcggatgatgaagatgctaaaacaattatgacggacttgcgtgagcagcttattatatacatacgaaaaataaaaataatatttgaaaaagaaggagccatagtgccaaccgggctttcatctcaagacgtaaacgtacaggctccaaaactatttactaatggatttgatattatgtttcttcgtgtcatcaaagaaattagtatggggatgtatacattaagtttaggcaaggcctacagagaagatgtggtgaaattttatcaggatttaacaaaaattacgcaagagtgctacgattcctgtacgcagtacttattgagaaaaggaattttatcacgcccaccctatattccaatgccaactaccgttgagtttgtttcagatagaaaatatctgagcggcttaaatgtatttgcggacaaaagagtactaaatacgatggagctagcgcagatttatcatggagtcgaaacaaacattgtcgggatgaagttaatgaaggctttttctcaaacggctaaggataccgaagtgaaaaagcattttttgaaaggaaaagaggtcagtaaaaaaattattacgcgacttgaagaaataattatacaagacgatatttcaccttctgttgcctcaacaggaagcataaccacttctgaaacgcctgctttttcggatcgtttgatgctgacatgcgatattttactaagtaacttcagtattggaagtcaggcgtttggagcagcatttagttttcgaagagatattgtggctaaaatgatgctgataggagaagatgcgtttcaatatgcaagcgaagcaacagaaattatgattaaaaaaggctggcttgaagttccgccaagtatggattagctaaaatgaaagcctctttcatgcattgtaaatggaagtttatatgtctttacacacctttaaccttttattcaagttgatttaacagactgcgtgtacagttaagttatgtcaataataaacagtaaagggtgtaaacaatgaaaaaacgtgcaattggagcggcagtattatcagcggtaactgtagcagcgctggcatttggaacaaattcaccaacagatgctaaagcagctaaaggcgtaaataaccaaaaagctaaaaatgttattctttttgttggagacggtatgggtaccgaccatcgtgatgcaatccgactggccgccgtaggagcaaatggaaagttagcaatggatgatatgccggcagtagggagagtccatacatcttcaggaaattcatttgttacggattctgcagcagctgctacagccatggcttcaggagttaaaagttataatggcgctattggcgtaaatatgaaaggaaagcctgttcaaacagttttagaaaaagcaaaattagctgggaaaacgacggggcttgtgacaacaagtcaagtaacagacgcaactccagctgcttttggcgcacatgttaaagatcgaagtgctcaaagtgacatcgcgaagcagtatcttgaaaacagtaagatagatgtgattctaggtggcggagaagattattggtacacaaaaggaaatgaaggtgcacactcagatgccccgccagaagataaaactgaaggaagcaaaggaacgcaaggaaacttagtaaacaaagcacaaaaacttgggtatacgtacgttaataacgaaaatgaattaaaatatgctaagggaacaaaattgcttggtctgtttgctaatgaagaaatgtttcaacaagctcctgaaggccaaggtgatgtgtacaaccctcaagtatctctaaaagacatgacaaaaaaagcaatcaatacgctatcacaaaataaaaaagggttctttcttgtagtagaagaggaggccattgatgaaatggctcataataataatgctgaactcatgattaaagcaggtaagcagcttgatgatacggtgaagatggctaaagcttatgctaaaacacacccagacactctcgtattagtaacagctgaccatgcaaccggaggtttagcacttgaaaaagtagacaataaagataacgatggagatgaagtatcaaaagaagatgggccatttgcaatcgctcattcaaaagagcagttcgttgcggattggacaactgaagagcatacgtcatcagacgttcctttaaatgcaatgggtgccggctcagaaagatttaccggagtatatgaaaatacgtatttacatgatgctcttctaaaagcaatgaatttaaaataggtgagataaaagcaccgtgttgattgaatacacttagtatgtaaatcaacacggtgtttttgctttgtttgagcaagttatgatggagtttcttcaaaagtatgctacgataagaattatcttgaattgaagaggtgtcacaatgaaaatagaagtttggtcagattttgtctgtcctttttgttatattggaaagcgccgattagaacaagcgcttcagcaatttgcacacaaagatgatgtgcaggttgaatttaaaagcttcgagctagatccaaatgccccagttaatactggcaaaacgattaatgaagctcttgctgctaaatatggaatgaccattgaacaagcaaaacaagcaaatgaaggtatcgggcagcaggcagctagtgtgggcttatcctttaattttgacgatatgaagccaactaatacatttgatgctcaccgcttagctaaatttgcaaaagctcaaggaaaagaagcagccattacagaaaaactcttatatgcatactttactgaatcaaaacatctaggtgaagaagagacgctggttgctgttgcagaagatgcaggtcttgaccgagaagaagcacgtcaaattctcgcggataaaaacgcatacgcaaatgaagtgcgcagtgatgaagcaacggctcagcaatatggcattagcggtgttccatattttgttgttaatcaaaaatatgcgatttcaggtgcacagccagtcgaaacatttgtaggagctctccaacaagtatgggaagaagaaaatccgactcccgctttgaagagcctttctccagaaggcgcagatgatgccttttgtgcagatggtcaatgtgccgttcctgattcctctaaaaaccaacaataaataaaaagcagaagcggaaatttcgcttctgctttttatttatttgcaaaaaaattcacaaaaacacaaacacacgttctgtttttgtgttataataagtttagaagcaacaaacctcgatgagtaagctccaaaaataagcgattaaaagtgatcccaccatgaactagcttccatttaatcctgcagggggaatctgaatgaaaagcaaagtgcgcattatcccatttcaagtagttgaacaattgaatcaatttaatgaagtcccagaaggagtcgctctaattggagcagagcaagtatggaagcaaacaaagggacggggaataaccatagcggttttggataccggctgtgatgttacacatcaagatttgcaggagcgaattattggaggaaaaaactttacacaagatgatcagcaaaatccagatatttttcaagattataatggtcacggcactcacgtagcaggcacaattgcagcagcgcataatggaacgggtgttgtaggagtggctcctgaagtgggcttacttatcctaaaagtacttgatggaaatggttcaggtcaatacgagtggattattcaaggtattaactacgccatcgagcaaaaagtagatatcatttcgatgtcgcttggaggtccgtcggatgtgcctgagctgcatgaagcgattcaagatgctgttgatcagaatattttagttgtctgcgcagcgggaaatgaaggagatggagaaggctccacagatgagtttgcgtaccctggctcatataatgaagtgattaccgtaggagctgttgatttagagaaacgatcttcggtattttccaactcaaacaacgaagtagatgtagtagctccgggagagaagatcgtatcaacttacttgaatggaaagtatgccgcactgagcggaacctctatggcaacacctcacgtagcaggggccttaggattgataaaagttctttcaaatgaaatgtttggaagagaacttacagaaccagagctttatgcacagttaatcagaagaacccttccattaaatgaatcaccaagagaagtaggaaacggatttgtgcacttgaccgttgttgaaaagctgttgcgtgaaattcaaagtcaaatgacttcagaggtgatcagatgagaagcagtttagatatgttaatgatggaaaagcagcaggcaaaagctctttatcacgaatacgtaaacaatcgaagttattatgatgaaaagacggatgaagaaaataaaaatctttattatcaagatacgctctttgaaagagaagccatgcaaactttgttaacggaaacgcatcagcatttgctaagttattcgccgcataaatatgtatatccatgggtggatctacaggagaatggggagctgaaaagtctatactcagggaaagggatggatccgttagaaactatacagcaagatattgatcaacttcaatcgtttagtaactcctctctttcaagcaatgacatactgctaaactgtgagcacgttgtcccgcaatcttggtttggaaaacacgagcctatgagaggtgacctgcatcatttatttgcgtgtgaaccttcttgcaacagccgaagaggtaattcttcttatattgacttcgcggattatacgccggaagtaaagcaatcagatgtgaaagaaggatgtggcaaagcagaaaaaggtaagtttgaacctgaatatggaaaaggaattgtggctcgatcaactctttattttttaattcgctattataataaaattgactcttcgcgagtagatcttcctcttttactaaaatggcatgaagaatttactgtttcactttatgaaaaacatcgcaatgcagcaatctttgagttgcaaggcaaccgaaatccttttatcgattttcctgacaaagcaggtgcgttaatgagttctgctttctaaaatagcgaagagctccgcttcaattcgaagcggagctcttttggataatctaatatgaaaatccatatttatcacttaaaagggcgtccattttatttaataagcgaaaatattcttcttgttcttctacacttagagctgctagcatatcttttaaaaatccatttcgcttctctgtaatcattgaaacaagtttctttgattcatcggtcaatgaaacccacacgactctccggtctttttcgtctcgcacgcgctgaatgagagattcttcttccaattgatttaataagctagttgtagcgcccgaggttaagtgaagtttatttgaaatatctgctaccatatactttgtgccgctggcaatgtagtttaagatataaaatttagtgggtgttaagtgataaggctgtgtttttaatgtttcttcgactaaatgtcgcatatattgaaaaaaagatgtgttaatttgataaaggtgttcaatttttgaatctaaattgttatccatgctagcttccatctccttgtacactacggacgtatataaactaactctaaaataaaatgaaacaattgtaaaggatggcaatgattatctttaaccaccattattatttttaaattaatacctttacgaaaaaatatctttatgataaagttatttaggtggttaaccaaatagatgattgtaaagaaacatatctcataatagatggagataatatctttatgaaaaagctatataaaaaagtaatttcattagtgaagtattaaggaggagtaatgaatgtctagaagtcgcttaatggtaacaaattttattggaatcatcgttattttagctttattaattggaggaggatattattacgttcaaaaatccaactatattacaacggataacgctaaagtatctggagatgtatacaatgtagttgcacctgcagcaggtaaagtagcaagctggacagtagaagaaggaaatgatgtatcaaaagatgctgaaattgctaagattcaagctgaaaaaggctctgtagctgctacagtaccagcagatggaaaaattattcaaacaaacgtaaaagaaaatcaaatggttcaagctggacagcaaattgcaaccgaagtagatatgaaagacctatttatcgtagcaaatattaaagaagatcagcttaaggatattaaagaaggcgacgatgtagatgtaacggtagacggagacagcagtgcaaaaatcgacggcaaagtcgaagaaattggatatgcaaccaattcactttcatctttaacatcgaactcaagctcagatggaaactacacaaaagtatctcaaacggttcctgtaaaaatttctatttctaattattcagagcatgtactgccaggtatgaacgccgaagtaaaaatttcgaaagactaattcttactacaacagttcaagaagggaggaaatatgatgacagccagtatagaaaacacaagtgatggatccatcaaaaagcatattccgctattgattgttttaatgcttggtttgtttcttgcgatattaaaccaaacgttactgaacgtggccatcccgcatttgattactgagtttggcgtaacggcaaatacagctcagtggttgttaactggatatatgcttgtgaacggggcattaattccgctttcagcttttttaattgaacgatttggtgtgcgtcgcttgttcttatttgcaatgttttgttttacagtaggatcattgatttgcggaattgcacctacgttttcgattatgcttaccggccgtttaattcaagctattggcggaggtgtcttatcgcctcttgttatgaccattattgtgtttattttccctcctcacatgcgaggaaaagggatggggatttttggtttagccatgatgttcgcaccggctattggaccaacgttatctggatgggttattcaaaactatgattggcacatcctttttaacggcatggtgccattaggtgccattgtattaattattgctttctttcaattaaaagacattcagcctccaaaggatgtaaaagttcacatgccttctgttgtgacatcacttgcaggtatgggattattgctttacggatttagtgaagctggaaatgacggctggacggattcagttgttctttctacaatcattggcggggcagttcttttaattatatttgttcttcaacaaattaaatctgaaaagccgctattggatatgcgcgtgtttaaatataatattttttcactatcaaatattattagtattgcgattacaatcagtatgtacgcaggtatgttcttgcttccaatttacttgcaaaatatccgcggatattctgcttttgattcagggctgctgctgcttcctggcgcacttgttatgctggttatgtcgccgatttcaggtacattgtttgataaagttggacctcgtccgctagcaatcgttggtatgctcattacatctatttcaacgtttgaatttacgaagctgacgatggctacaccgtttactcatattttagcgatttatattatccgctcgttcggtatgtcactcttaatgatgccgattatgacagccggtttgaatcagcttccgcagcgactaagcagtcacggaacatcaatgtctaatacgcttcgtcaagtaagtggttcaattggtattagtttaatgacgaccatttttacgaatcgtacaacgtatcatgtaaatgaaatcagcagttccatgaatacgtctgatccattctttatgaacagctttcatttatttgtacaaaaggtagctgctactttgcatttatcacaagatgcggctcagcagcaagcgctgacgattttatctggaaaaatgacgcagcaaggtacgatccaaggtattaacgatgccttttactgggcaacagcaatttctgttatcggtttaattctaagtttcttccttcgtgacgtacgtaaagataaagtagtccaagaaaagaaatcagaagctcaagaggaagatattcgtatgcttccagctcctaaaagtataaattcataaggtgctatagaatcaaaagttcctcataaaaatgttggagagaaaggggtggtgaggtggatggatccattgatatttggtgaagaaattcaaagaatttcaatatctttaaacaaaaaagtaatgacaaatgtaaaaagccttttacatcattacggaattaccccttttcaatatcatattttactgattgttgaacgtgcacgtacaatgcctgtcaccaaagtggcagacgagataaaggcgagcccaagtgttattacagcatcgattacacgtttgtatgaattgaatcttgtggagcgctaccattcaaaaagagatcggcgtaaagttatggtcgagcttacaaacaaagggaaacaagtgattcaagctgctgaaaaagacatgcagcaaggggttgaaaaactgtttgcttgctataaagaagaagaacagcagcaatttctcacgctctgtcgacagctagatgaacatgtgacttgaacttgagtagaaaaaagtatattgagttaagcggagtgagtgtaaatgaataaagaaatggtaaaaaacattcggaaaaactacaatatgaatcagcgaaactttgctcaagcagtgaactgcagcttttctttaattgcactggttgaagtggggaagcgaagagtaacaaaaaacttggaagacaaaattaagcaagcatttcaattgaacgatgatgatttaaaaacactgcaaggttaatacaaaaagtaggtgtgaaacgagcgcacctactttttttcgtcttgtttttttgtaagcggatctaccgtatgtttgtaatcataagctttcgaagtagtaactatgcatagcagtaaaataacaaatacaatgataatagagagtgtaataatgatgatcatataaaacgtcctttctttttcttattacgtatgctttcggtcttattggtaaaattccttctttctccacatagtgcagaaacgacaaacgcatactagtaacagtctagaataaaggagtgtttataatgaatgaaaaagagttgaaaaaacaattaaaaaaggtagcggattatcctgcatctaaagcagatggagtagacgaagagttttctcgtgaattagcagaccaagacgatttagaagctcaggctagagcgaacgctgcagatgagagacaaaaaaagcaaaaataaagctgagataaaagtattttagcccaagtgaaaaacgacccactaattgaaatgtttgattagtggttcgttatttctcagcctcgtttattatcttttcaaaagcaaataaataaagtaaggagcaccgattacggcagcaataattcctgctggtagaccgttaggatcggcaatgttatgtcctattgtatctgcaatcagcaaaagccagccgccaagtaaaatagcaacgggaataaaaagctggtttctcggtccgactaagcctttggcaatatgaggagcaagaagcccaataaaggcacccccgcctgtaactgaaactgcggctgccgctaatgcaaccgctgctaaaagcaatgttacacgttctttctctatagcgatgccgactccaatagctgcagcttcatttaagttaaaaatatttaatgaatttgctttgtacaatataaaaggaatcaagacaagaagccaaggcagaagtgcccatataaaaggccagtctgtcccccaaatgtttcctgcaatccatttagcaataaaatcaactttagcatgatcagctgatgacataatcaccaccatcattccagaaagagccatcgaaaaacctacgcctgttaaaataaactttacaggctgcagcccttggcttttactatatgcacaaaggtagataaggccagctgtaaacaaggcgccgatgaaccctactaacggaagagcatacacgaaagagccagcttcaattggaaaaaataaaaagaatacggcaattgcgaggcctgctcccgaattaattcctataattccaggttccgctaaatcattgcgcgtaacaccttgtaagatagcgcctgataaagctagagccattcctgctaaaagagtaatgataattcgcggaagtcgaattgaaaaaagaacaaactcatccgcaaaattccctttgccaaaaagagtaggaaacactttattataaggaagggaggcatcaccaagccccactcctatcacaatcgttccaagaatcaaaacagtgagcagcatcataattattcgttgttttctaataagggctgggtggatcatgagaatgcttttcctcctttacgaacaatgattaaaaagaaaggtaaaccaatcatggatacaactgctgctattggtgtttcataaggcgcacttacggttcggcccaacgtatcagcgagcagcataaacgctgcgccagtgatagccgacatagggataatataacgatagtcggttcctacaattcctcgtacaatatgaggaatcatcaagccgataaacaccatgtttccgactagcgcaacagaagcacctgcaagaagaaccatgacaacaaataaaatggttttgacctttgttgtttgctgacctaaccccacagcaacttcttcatttaaacttaaaatagtaagctgccgagaaagcaaaagggcaatgaatatacctccgacaataaagggaacaatgatttgaagctgttcccaagaagtgcctaccattccgccagcagtccacatcgatacatcttttgaaattttaaaataaataccgacgccttctccaatcgcataaagaaacgctgaaacggcagccccggctagtacaattcgaagcggagaaaaaccacctctttttatagcagcaattccaaacaccaaaattgcgccaaccgcagctccaataaagcaagcaatcgtaatacctaaataatttacagaagggataaaggcaatggttacagctaaagctgcatttgcgccagaagttaagcctaaaagtcctggatctgcaagaggattttttgtcataccttgcataatcgcccctgatactgataaagcagcgccaacaaaagcagcggcgatttcacgaggtaggcgaatatctcggatgatcgaaatctgttcgtttacactgcttgatgaaagtgctagccacacatcttttatcgatatgtcagcagcaccaaaaaccatggaaagaccaaacattacgatgaatacgagcagcatacctattaatttatataagaaaggaatgaaccgctgattgtctattttcataaaacacccatcttttcatataagaataaatttagtaaaacaaagtaagaggaattctaaaaagaattcctcttgaatgaattacttgccaagaaatttttgagtaaagaaatctagttgataatctaatgtgattggatcattaaaataaaattcttttgcatttgcttcaaatacgtgattattctttacagcaggaatatttttgtacgtatctgttttctcaaatgatgtatctccatcttggtttttgctgaagattaaataatctccggcatattcaggaagaacttctggcgaaatcgcatagtatccatctttcaaagccattttctttactttctctggcatttttaatttcatttcttgataaagaatttccgttccgcgtccccagttatcgccaaacacatacaactgcttgtcaaagttctcaataactgaaaccgtggtatcttcgccaattttagctttgatgtcagaaccagcttttgccgtacgctttttaaaatcgtttacccatgactgtgcttctttttctttatttaatagttttccgatttctacatgctgagtaaggtaatctactttatcgtatgtatacgtaacggtaggagcaatttttttcaatttatcaacgttttttgtagtagataagccaataattaggtcgggctttaatttaatgatcttttctaaattttcatctgatacttcttcaacgccttttaatttcttttcaaagcggggattcattttagaccacgaatcaactccgacaatattgacacctaacgacatgacgttacctgcgtaagagcctaacactacgacacgtttcgggttagccggaacttttacaggaccgtcttcagattgatatgtgattgtcttggatccgctgtttcctttattagaatcgtttttgctttcagttgaaccgctgctgcaggcactaataagtagtacgaatatgagcatgaatggaagcagtaattttttcatttagttatctcctcttaataagttatacgtgatgcacattggtttattggttctcgggtctcgtccgatttcagcgtcgatatgaaacactttttttagaacgtcatgcgtaataacttcgttacacgttccagctttaacaatttctccatcttttaaagcgataatataatctgcaaagcgagcggcttgatttaaatcgtgaagcaccattacgacggtacgttcttgctctttgtttagtttttgaagcagctcaagcacttctaactgatgggccatatctaagtaggtagtcggctcgtcgaggaatataatgtcggtttcttgagctaaagccattgcaatccacactcgctgacgttgaccgcctgaaagagagtcaacgagacgaaacttgtagtcttttatgccggtgacttcaagcgcccagtcaatcgtttgatagtcttcttttgatagacgtccaaaacctttttgatagggaaagcgcccataagacacgagctcgccaacagtcaacccactggcactttccggcgtttgagggagaatggccatttttttagcgagtgattttgtatgttcttttgaaatgttttccccatctaaaataacggaaccagattgatgagaaataatgcgggtaatggcttttaaaagcgttgatttgccgcatccgttggaaccaataatcgttgtaatctttttgtctggaatgttaacgcttaaattctttactattagacgttcaccataactaatatgtaatttctctgtatataggcgaaccatatctgaacctccgtttatatttaatacaacaaatatatgataatgattatcaatatcgttttctttacatactataattcgaacgttttcgtatgtcaatagttatttttattgtcaaaacggtgaagaagatgtatatttaaatgagaatgataatcaataacggttgattataaggagtgaacgtgcatgacacaccatgaactttttgatgtgacaattatcggcgggggaccggctggcctttactcggccttttacagtggactaagagaaatgaaaacaaagctgattgaatatcagccaaagctaggcgggaagcttcacgtttatcctgaaaaaatgatttgggatgtgggcggacaaactcctgtggctggtgcaaagcttattgaacagcttgttgaacaagggctgacgtttgatccaactgttgttttaaatgagaagattgaatccatttctcgcttaaaagatggtattttccagctaacgagttcttcaggtgaacatcattactctaaaactattatccttgctgtcggaggaggtattttaaacccgcaaaagctcaaaattgaaggagcagaacgatttgaagtaacaaacttaaactatacagttaaatctctgcagcattttaaaaataaaacggtgattgtttccggtggaggcaattcagccattgattgggcaaatgagctagagcccgttgctaaaaaagtgtatattacgtaccgaaacagcgaactaaatggtcatgaagcacaagtgagacaattaataaatagctcagctcggtgtctgcttaacacatctattacaaaattagtggctgatgcgacgcatgaatttatagaaaaagttgaactgactaatcatcaaaccggtgaaattgcttacttgccgattgacgaagttattattaatcacggctatgaaagagacacagagctgttaaagggcagtgaactacatatcaaaactattgatgactattacatcgcaggtaatgcagcaagcgaaacgtctgtagaaggcgtgtatgcagcgggagatattctcatgcacgaaggaaaagtccatttgattacaggtgcttttcaagacgctgctaatgccgtaaacaaagcaaaaaaattcgttcagccctctgctgctaaggcggctatggtttcttctcataatgaagtattcaaaaaacgtaattcagcactaattaaacaaatgatgaagtaaagcgaggtgcagggtgcatgtcgcttctttctctacggtggaattatctacatggagaggcagggaacgaaaaaagaaaagagaaatataataaaagaaaacgcttacatttttcagaaatgacatagtgcttgtgtgcataagggggaagccgtatgaacgaaaaagagaaatatcagtttgaaacaaaagccattcacgcagggtatgaatcaaaacatcattttgatagcttagctccgcctatctatcaaacgtctacatttacattttcatctatagaacaaggtgcaaaccggtttagcggagcagaagatggttatgtatattcccggttatcgaatccaacggtcaccattttagaagagcgtatggcacagcttgaagaaggagaagccgctttggcatttggatcgggaatggctgcagtatccgctgtattgattggacttacaaaagcaggcgatcatattttatgttctaaaggagtgtatggatgcacatttggtctcttagaaatgcttgaggaaaaatatcaaatccatcattctttctccaacttggaaactgaggaagaaattcttgctgctatcagaaaagatacagcatgtatttatattgaaacaccgattaacccgactatgactttagtagatttagagttagttgcttctatcgctaaacaaaaaggaattcctgtggtagtagacaataccttttcaactccttatttgcaacagccgctgaagcttgggtgcgacttagtcattcatagcgcaacaaaatttattggtggacacggagatgttgtagcaggaattgtagtagggaacgaagaagttatttccgtactgcgcaaaacgacgcaaaaagatatcggaggcattctttcaccgtttgatgcttggctattactccgaggcttaaaaacgctggccgttcgaatggatcgtcactgtgagaatgctgaacatatcgcaaaacaattaagtctccaccccaaggtgaaagccgtttattatccaggtgataaaaaaagcactgcttattctctcatgcaaaagcaaatgaaaaaaggaggggggcttctctcctttgaagtgaaaggaggttatgaagaaaccgtaaaagtggttaatcagcttaagctcatttctattgcggtgagtcttggagatgctgaaacacttattcagcatcctgcctcgatgacgcatgcagttgtgccggaacaaactcggaaagaaatgggaatttcaaacgaactccttcgtttatcagttggactggaagcatgggaagatattatgagagatttacagcaggcattagatagtatataacaaacgttcaaacaacgcttgaagtatcttaaggatatttcaggcgttgttttttgaatatcaaccgcatgtcatcactcatacatccttttttgcgaatagaactttacctacatctttagacaaatgtcctagacagaagagatgcctttcaatagactaaaggttatctgtaaaaatacaatatttaggtgaggaaggtgctctgctattatgcttcataacccaactggaaaaaaacgtctaggattggcgtttctcctcagcacgcttgcgatattaggtccccttaatatcgatatgtatttgccaagtttccctgctattgctgatcatttagatgcgcgagcttcacttgttcagcttagtttaacatcgtgtttattaggccttgccattggtcaaatcgtgatcggtccaatcagtgatgcgaagggacgaaaacggcctttacttatctccatctctttatttatgatatcgtccttgctctgtgctttggctcctactattacagctttagtcatcgcacgctttttacaagggtttacggcttcggcaggagttgttctttctcgagccattgtcagagacgtttttagtggaagagagcttacgaagttttttgctctgttaatggttatcaatgcctttgcgccaatgatagcaccaatggccggaggtgctattttacttcttccttttgcaagctggcatactattttcttgtttttaagtttaataggtcttttaattgttctaacaatctcaatgcgtttaaaagaaactttgccaattgaaaatagaacgccaagctcaattggtcattccgttcgcacgatgggcagtttattacaagaccgttcttttattgggtatgccttaattgtcggactggtccacggaggaagctttgcttatgtatcaggcactccatttgtctatcaagggatctaccatgtttctccgcaaattttcagcattttgtttgggattaacggcttggccattgtgactggaagctttattatagggcgctttagcggaattcttcatgaaagaagcctgcttcgcattgccgtgattacggctgtaagtgctactagcgtacttcttatcatgaccatgcttaaagggccgctagctacgattgttattcccatttttatttacatgatctctataggaatgacgatcacaggctcggtgacattggcaatgaaaaatcaaggacatagagcaggaagtgcgagtgccgtgttaggcatgcttccgctaactttaggatcaattgtttctcctttagtgggtattaacgaaaccacagcgattccgatggctgctattttatttagtacggcgcttttaggttttgtagctttctttacgttaactaaaaacaagaaagaaacagaaaagtgcgaagttaatgagtttaaaacggaggtttctccgtaatcacttttttgattgtttgaaagcatcactcctttgtgaaaatgagtggtgcaaatttattcaagtattggataatatatgctaaccttagggcatgatcgaaaggagtggataataatgagtaaagtaattcctgaaataacccttaatgacggggtaaccttgcctgctataggttttggtacatataagcttaacggaaatgaaggagtcaacgctataacgagtgcgattgatgtagggtatcgtctaattgatacagcttataattacgaaaatgaaggcaccgtgggccaagctcttcgaagaacaccggtttctagacaagaactattcgttacatctaaactcccagggcgctaccatatgtatgataaagcaattcctactatccaagaatctttatatcgcgcgaatttagactattacgatttgtatcttattcattggcctaatcctaaacaagatcattatgtagaagcttggcaagcattgattgatgcgaagcgctggggcttaattcgttcaattggtgtttgtaattttcttcccgagcatgttgagcgcttggaaaaagagaccggcattttgccaagtatcaatcaaatagaactgcatcctttttttaatcaacatcaatatcgaaattggtatcaggagaaaaacattcaaattgaatcttggagtccgctagggcgagcaagtgctgttttagaaaatgaaacaattaaacaaattgccgaccgtcataataaaacagtttcacaagtaattttgcgatggcattatcagctaggagcgatttcaattccaaaatcgtcatctcgcaagcggcagcttgaaaacatatccattttttcattttctttagatgaaactgagatgaatatgatttcagaattaaatcgcgaggatggaagacttaataatcaagacccctctgcttatgaagaattttaattataaagcctcacttactttttaagtgaggcttttcttctattatggtttttagttatttaagcttgaaaatagtccgtttagttctaacgattgtagaagaaaatgtgttaaaatattccgaaaaaaggagtggtgaaccatgggaaaagtagtaaaagcgattcaagacgaatatccggatgattttgcatggtgttacggatgcggccgattaaatcaggaaggctatcattttcggacaggatggttaggagaaaaaaccattaccctttatacacctaagcctgaacatacagctataccaggatttgtttatggaggacttcttgcatcactgattgattgccatggaacaggctctgcttctcttgctctataccgtaaaaatggctacgaaataggagattcagcagagccgccgcgatttgttaccggttctctccacgtggattttaaaaaaccaacgccgcagggtgaagtactaaaagcaataggaacggttgaagaaattcacccgaagaaatggagagttaaaacagaagtatacgcgagtgacatcattgttgcgaccggagaagttgtagcagttgttatgccaagtacgtttaaacaaaaagaagactaaaaaatgtaaaacagttacataaaaagggaggaaaaggtatgggtaaatgtaatttagaccactcggtagaagatgtacagcagaagtttaactcgcagtcacaatggctgccagaagatattcgctcgttatttcatgagtttctcgtacgaaatccttcgcaaacaacattaaacgagatgtttcatttgctgaagaaatatgatttggttgatgaacaagaaagaaaagagcgagatcgaaaaatcaaatggctgatattaaataaagaaaatacgaacaactagaagcaactacatgcagtaaacctacgtttacgaccacagtgaaaaagtccgaacgagttggattctccatcaagaatctcgcttcatcgttcggatctttcttcaaataaaatgcttttaccccagcctctttttaacgagattaaaagtaatcaccaccacttaaacccgtcgtcttctaacaaatgatttgaagccgctggtcccatcgtacccgcaggataaaaatgaagaggaaaacgttcatcattaaaaacttctaaaataggttgcacccatttccaagataattcaacttcttcccaatgagcaaaaaatgtggaatctccctgtaaagcatcaactaacagcagttcataagcttcgggtacttctctttgatttgttgagaaattgataaaaataggttcgattttattatcattcaaagggtttttgctgtttaattgcagtgatataccttcatttgggctgatttcgacaaccaaaaggttgggaataacttcttcgtctgtataaacatcctttaaaggatgtttaaattcaatgacgatacgcgtgcattttttactcattctttttcctgtgcgaagatagaaaggtactcctttccaaagctcatgatcaatccatacccgcactgctataaatgtatcattaacggaagcagcattgatgccgggctcatctttatatcctataacggaacgattttggatttttcccgcttcgtattgacctcttatgacgttcgaatggataaactctttttgtagaggacgaaggcttttcataatttttatcttttgttggcgagtctttgcgatgttaagtgtctttggcagctgcatggcagtcatcataagcatttgaagcatatggttttggagcatatccctaattgcaccggcctgatcatagtaaggcgctctttcttctacaccaactgtttcactagctgtaatttggacatttgcaacgtagtgatgattccatagtgcttgtaaaatagggtttgcagatgctaaagcctccaaattttggatcattggttttcctagatagtggtcgatacgataaatctcttcttcattgaacgtttcagtaagcttttgatttaacacttgagcagattgtaaatcgtgtccgaaaggcttttcgataataagacgtttccagccttttgtagatcctaatccgccgctgtttatatttgaagcaatgacgtctacaaattcaggagccactgataaatagaaaagacgattttcaggaatatttaattctgcttcgccttcttgaatagcatgcagcaactggtcatatccatcactattggtaacatccattttatgatagcgaactgtcttaagaaattcttttatcttggattcaccttgtctaaagcgccttgaaaaagtctttactgattcttctacatatatttgaaaggcatcatcagaccagttgcttctatccgtaccaacaatagaaaaggaagaaggaagctttttatctaaaaataaattatataacgcaggaaaaatttttcttttagctaaatctcctgttgctccaaataagataaaggtcatggaatccacttctaacgcttgtggtgaatgagacttgagacaattatcacgtgaacgagctacactgcccaattgatctcctcctttattttaacggtctattgcagtgaatatagtcttttaccacctttacagattacagtatagcaggtacaattttcctttataagtagacactttattttcatatagtgtctaaaactatactattacgcataaaaagggaggaaaaaggattgagcagactttttagcaaaacgtttaactgtgaaaaggaattaacgttaacgattattggaggcaagtggaaaatgctgattatgtggcacctaggaaaagaagggacgaaacgatttggggagttaaagtccatgatgccgggaattactcagcgaatgttagtaagtcagctgcgagaattggaagaagatcaaatcgttcaccgaaaagtctatccggttgtccctccaaaagttgaatattccttgactgaacacgggagaagcttgatgcccatccttgagagcatggatgagtggggaaaaaattatatggaaaccgttatagagcctgaaatgaataattccagccatatgggttaaaatcttttggtgagaaggataaaaccactcttattattcagaattttctaaaataaatacaaatgatacgctgcattgaagcgtccatagtatatttttagtgactatatgttttaaaagtgcctactttttttttgaaagtaacggttttacaatgaattcatgctagacaaccccatttaatgaaggagtgaagtaagtatggaacttcaattagcattggatcttgtaaatatttcagaggcaaaagaagtagtgcaggaggttcaagagtatatcgatattgtagaaattggaactccagttgtaattaacgaagggctaaaagcagtcaaagaaatcaaggaagcctttccgtctttaaaggtattagctgatttaaaaattatggatgcaggtgcttacgaagtaatgaaagcttctgaagcgggtgctagtattattacgattcttggcgctactgatgattcgactataaaaggcgctgtagaagaggccaaaaaacaaggaacacaaattcttgttgatatgattaatgtaaaaaaccttgagcaacgtgcaaaagaagtcgatgcgctcggtgttgactatatttgtgtacacacagggtatgatcttcaagctgaaggagaaaccccgttcgagcagcttcaaacgattaaacgagttgtaaaacatgcaaaaacagcggtggcaggaggtattaaactgaatacacttcctgaagtcgtgcaatcacagccggatcttgtgattgtaggcggggggattacaagtgaaaaagacaaaagaaacgttgcagaagaaatgaaaaaagtagtcaaacaagcaactttggtctaaaaataagcaaaagtatttaagccttcaaaattaattaatcggtaaatggtttaaaaagaagatagctaagttattttagctatcttctttccgtcatttttgatataaccattcattgataagtgtcattttgacagatagatagtttctttaaaattcgttattcgaaagaaaaagacggcagtttttctgatattttaaagttaagaaagcgttatccgaacattagcggaagaaagtctaaaaaaatctatgtcacactttttaacaaaatactttgaaaattatgaatcttaaaaatataattaactatcgacaatatttaacatcttcaaaccaaaaaaggagggagatataaagtgatggaacataagaggatagtagtgataggagctggaattgtcgggtgcagcattgcctactatttaagtaaaatggggcaaagaaacataacagtgattgagcaaggccctttgttcgaaacgggaggatctacttctcacgctccggggcttgtatttcagcttagcttttcaaaagtcctgacaacactagcttctcaaacagtcgagacctttaaagagttgagtacagatgaacagcgctcgttttatcctgtcggcagtttagaagttgcccgtacaccagagcgattagaagacctaaagagaaaggctggtgttgccagctcatggggaatcgaagctcttcttctttcaccgcaggaatgcgcggaaaaaaattcgttgatttgtcctgatcgtatttgcggaggtctctatgttccttcagacggtattgccaaacctttgcatgccgttgataaaatgactcgtttttctaaagagtgcggagtagaattttacggtcatacagaagtgacgaatatcgaagtgacaaatggtcaagtaaaagcagtgtacacgagcgctggaaaatttgaagcagatgtaatcgtgtgctgtgccggattttggggacctcgcatcggagaaatggtcggtgtaacaattcctcttcagccgatggctcatcaatatgtgtttacaaatgatttacttgaattaaacggagaaacggaagaagtcgcgactcctcttattcgagatcaagataatgcaatttattttcgtcaggtagacaaagggcttgggattggatcatatcagcatgagccgtttccaatcgaactcagtgacattacaaaatacggagaaacaaaagaaatgccttctgttaaaccttttacaccaaaagattttgaaaaaccgtgggaagatgcattggaactaattccggcattaaaacagccaggaataaaaaaaggaatgaacggcattttttccttcacacctgatgggatgccgctgcttggcgaatcacaagcagtagggggattttgggtagccgaagccatatgggtaacgcactctgcaggtgtcgctaggcaaatggctgaatggctgatgaatggtgcaccgactgtggatttggagctatgcgatattaatcgtttcgatacgtatgcatgcagccctgtttattacaaacagcggtctattgaagaatatgaagaggtttatagcattcatcatccatttatgcagcgaaaagtatcgcgaaacatgcgcgtaagtccattttatatgcgtcagcaagaactaaaagcgtattttaacgaaaaagcagggtgggagcagccgcagtggtatgaagctaactatccgcttatatccacatatgaaaagaagatggttataagaaaggggtggtcggctgaatattggtcaccgattatcgaggctgaacagttgcatactcgtcagtacgcggcgatttacgatacaacggcagcaaagaaaaggttggaaattaaaggggaaggagctctccagtttttacagaagctaacgacaggaaatatagacattacagtagggcaaagcatacgtacgtgtatgttgcatgagcgaggcggcataaaagatcaaataatggttattcgcaaaaatatatccactttcttgattgtttgtacgggagccgtagaagcaagctggattcaaaaacacgtgcctcaaaacggtcaagttgtttttcaagatgtaacgtcagggacatgcagtatagcattaattggtcctaaagctacaggagtaatgaagtccgtggttcaatgctcagaacttagcagcacttggattgaagggcaagcgaaaaccttgtttattgaaaagagttcagttcttgctctgcgtgattcctacgggggaatggagagctgggagttgattacgacttctgatcaaggtctgaatttatgggatgtattaattgagcaaggacagccttatcagctgattgccgcgggagaccgagctcttgaaaatcttcgaattgaatctttttcgttaaaaagcgggaaagacttttggagcgagcatcatccatatgaagttaaccttcatgaaatggttgatttaacaaaaccagtttttattggaaaagaggcattgcttgatcgtcagcgaaaagattctgaaacagtattagcgacgctcatattagatgatccttcagcgatagtaatgggatatgaaccggtcttttatggagaaacagccctcggatttgtgacaagtgccggctattcatacagcttaggaaaaggaattgtacacactttattatctcaagctgtacatgaagaaatggttttagaagttgaatactttggtcagcgttataaagcaacaatgatgacacactccccagcggtagtttaattgatcaatcgaaagacaggaggaatgcagatgtcaacacattatgatgtcattattatcggattaggagctatggggagtacggctgcttatcagctcgccaaaaaaggtcagcgggtattggggttagaacaatacggtcccgctcatgacctaggatcgagtcacggcggttctagaatcattcgacagtcgtattttgaagaccctgcttacgttccattattgcttcgcgcctacgaattatggaatgaaattgaaagagaaagcggtcaagaaattcttacggttaccggtggacttatgatgggacctcctgatagcttgacggtttctggaagcatcgaaagctctaaacagtggaatcttgcgtatgagattctagaagcaaaggatatttacaaacggtttccggcgtttacaccttcacctgctacggttgctctatatgaagaaagagctggattcgttaggccggaagcgagcgtatatactcaccttcttcaagcagaaaagtacggagctgagcttcatttttttgaggaagtggtgtcgtgggaagctcatccttctggtgaaggcgtgcgcgttataacagctaatggagtatatgaagctggaaaaatcattatttctgcaggcgcttgggcacctgatttattacgggatttgggtgttagcttacaagtagagcgtcatgtgcaaatgttttttgaaccaacacaaggaatagatattttttcagtgggaaaacagccgatttatatttgggaagcagatgattatgtacagttgtatggtttcccttcgtttggattaaaggctgaaggagcaaaagtggcgttttttcgaaaaggaacagcgtgtacgccggaaacgattgatcgaaatatatatgaagacgaagtgaacatgatgcggcactatctagctcaaggtattccacagcttaacggtcgatttttacaagggaaaacgtgcatgtataccaatacaccagatgaacattttgtcatttcactgcatcctgaatatcctcaagtagcgattgcagctggattttctggacatggttttaagtttgcaagcgtagtaggagagattttagcagatttagtgatagagggaaaaactaatcacccaattgatttgtttactccgcagcgatttgcggcgaataaaatagtataaatcgtcgtcagctcttgcgaatggttctatttaaatgtttctaaagaagcgaaggaggaatagtagatggttatggaacatggtttagtgaatgataatgggagacttgagcccacgttgagaggagagctgtatacatcttcggacatttttaagttagaaaaagatcatatattttctaaatcatggagtttagttgcatttgaatacgaaatagcggaaccaggacaatatattacgacgagagttgaaggcgaaaatattttaattactagaggaaaagatcacgtgctgcgtggattcttgaacgtatgtcggcatcgaggagctaagctgtgcagccaatcatccggtaaagcaggtgttattcgctgtccatatcattcgtggagctatagcttagatggtgatttagtgggcgttcctaacacaagccgctgtcgagaagaactcgtgcataatgaaaattacggactaacatccgttcacattaaagtgtggcacggcatggtttgggttaatttatctgacaatcctatatctgttgaatatcagctagacgcacaaatttttgatcgttttggagaactttatacgtttgctagatatgaaattcaaaacttgaaatccgctcatcgtgaagaatatgaagtcgaggcaaactggaagcttattgtagaaaactttcaagagtgctatcactgttcctctattcatcctgaacttacggcaacgctgcctgaatttcgttcaggagtcggcactcaaagttccgtgggaggcggagctaagtttgggaatgaattagaagctttttcaatcagcgggaaaggaagccgtcctatgctaaaaggattgcttccggaagatgaccgcacgtattttggcattaccgttctgccgcttgtatttatcaatttaacaccggatcacgttattattcatcgtattattccaattagtgcggaaaagtctaaagtgatttgtgaatggttattcgacccggaagaaatggctaagcctgattttgacccaaaagatgccgtggaattatttcatcgcgttaatttacaagactttgaagcgtgtgagtggtgtcaagaaaatatgagctcaaaatcttataaagaaggaggtattttagtacctatcgaacagcacgtttctcaattttacaattatgtattggaagcaatcggtatgaaggtcgaatagtaagtagaagtggtctgacacgttaccttgaggtgtcagatcacctctaacaatctactttaaaaaaagggggaaataaattgagtacaagctctaaactaacagaacccattatccgcgttaccgatgtttcaaaagtatttggccgtcaacaagaacaggctcttaagctacgagaagctggagaaagtaaatatgaagtcgaacaagctactaagacaaccgttgctatttacaatgctcatttcgaagtgaaaaagggagaaacctttgtgttaattggattatcaggaagcgggaaatctactttacttcgatgcttgaacgggcttgtagaaccgacagaagggacggtatatctagaaaacacagatatttctcatatgccaaaaagacagcttcaggaagtccggagaaataaaattgggatggtctttcaaaatgtgggcctccttccaaaccgcaccgtgattgacaacattacgttcggtctagagatacaaggtgtatcagcaaatgaaagagaaaagcgagggaaaaaggctcttgaaatggtgggcttaaatggacaagcttataaaagaatttatgaattatcaggaggtatgcagcagcgggttggactagcgagagctcttgcttctgaacaggagattttgctgatggatgagcctttttcagctttagatcctcttattcgaagagatatgcaaaagctatttcttgatattcagggagaagtacaaaaaacagttatttttgtgacgcatgatttagatgaagcattaactttaggccaccgggctgccgtgatgaaagacggggaaattgtacaacttggaaccgctgaagatattttaagtcaaccggcaaccggttatgtaaagctgcttgttcaagacgttaattacggcaaaattcgccttgctaaagacgcggtggttccggtagaaacggctgcctatgagtatgaatcaccgcaagtcgtattaagaagaatgagaaccaatcatttatctactatttttgttcttgatagtgctgaccgcttattgggcttaatgagcatttatacggtgatggagctgatagaagctcataagcatgatttaaaaggcaaagaaatgacacagccccattgtgttaatccagatatgtctttacaagaaatgattcctttatttacagacagtcattcgcctgtagtcattgttgataatcatcatcgcctacaaggtatgatttccccaagcactcttattgcaaatctcactgaacgtactgcagtgactgagcaacaagaagttaagtcatatcaaatggaggtccgataaatatgatggtaaattccgcgacgattcctcgtatccctttagataaatgggcaaactcatttgttgattacatgattgatagtttttcaggtgtatttactggaatcaaccagataatgaccagcttaataagcagtctcgaatgggtattgaccgcttctcctccgttagtaacggtcgttgtttttgttctattagcgctatggctaacagagtggaagatagctgtatttacgtgttttggtttacttcttattattagcttgaatttatgggaagcatcgatgctgaccttatctctcgttttagcttctactatcatctcacttctatttggcgttcctttaggcatattatcacaccgctttaacaaagttggagcagtgataaagcccattcttgatattatgcaaacaatgcctgcttttgtttacttaattccgtccgtacttttatttggattagggaatgttacagctcttattgctacttttattttcgcaatgccgcctgccgttcgtctgacgctgcttggacttcagcaagttccccaaaccactttagaagcggcagaagcttttggagcgacggaatggcaaaaattaattaaagtccagctgccgctcgctttgcctatgattatgtcgggtgtaaaccaggttattatgctatctctttcgatggttgttatttcttcaatggtcggtgcaggaggcttgggtgctgaggtattaagaagcatcagtatgttggatgtaggcttaggatttatcggcgggattgcagttgtcattattgccgttattttagatcgtctgacgcacctttctactcaaaaaagagaaggtattcaatcaagcaaataaaatgaataaaggtgggagtatatgaaacaatcaaaaaaagttctttttattatgctaacaatcgtcattatgctgcttgtctccgcatgcggcaatagcaatacggcaagcagcgcgacgactaaaaaagaaattacaattggatacataccatgggacgaagccgtagctgttacgtttctatggaaggaattattagaggaaaaaggctataaagttaaagcagttcaaagcgacgtagctccgcttttctcaggagttgctcaaggaaacattgatttatttttggatgtatggatgccgaccacccatagctcttatatgaaaagatttggaaaacaagttgacgtgctcggtacttggtatgatcaagcagatagcggattggccgttcccgactacgtagacgcgcagtcactagctgatttaaaaaataagaaaggtgagtttaacggaaagattattagtattgaaccaggatctggaataaacggtcttactaaagatcatgcgatgccaagctatgagttaaaagactggaatttagtagaaagcagcacagccgccatgttatcggaattagataaagccattgctaataaagaacccattgttgttacgttatggcgcccgcactgggcttttgaaaagtataatctcagatacttaaaagatcccaaaaatacgatgaatccaactggacctgaaaaaatacagtcgattagcaaaaaggcatttaaagaagattatccagaagcagcaaagtggctgaaaaatttttctattagtgccgatcaactagcatctttagaatcagaaattaacagtgcaaaagacgaaacaaaaggtgtgaaaaactggatttctaaaaataaaaaagtgaaggaaagctgggtaaaataatagaaggaaaagaaaaggctgtctcataagtgaagctattaacttagagacggtttttttgtgagagaactttttatctgcagcttttctaacggattaaggtcgataaaagctcaaaaaatgaaagttttttaacctgatatgtaaatttaaaaaatatatttaaatttaaaaaagtggcattgctttctactatccaagtacaatttaaataatgaatgctttacgtttcgcatgtaagtatttatttacacctatgttgtcataatttatgtgattcccaaaagcataaattacttttcattaccttattgtgtacaaaaatattgtaagataggctcatgcttttaacagcatgagcctatttttatagacagcttgaaaatagatatttccaaactggaaaattaatctttccctcttgtacaataaatattcttctgtacaaaaatagagtgtataataggaatgttgaattgataggaaaaagagagaagccctatcaagtaaaggaagatggagtggagagtgtgtactgaaagtaaaattgtccagcggcaaaaataaacatgtttttcgaatgcttctagaagaatatctagaatgaaagtaggaacattatggaaaagaaaatgaggtttggcatcaaatccaaaattattattggatatttaattgttattgtctgtttatttattgcatttattgttttaaacagtcaaatttcatctttgcaaaaagaacgaaattttatcattgatcatgatattgaagtgcatgatctgaccaatcgaattgaaaaacacctgctcgatatggaaaccggacaaagaggctatattattacaggagaagcgagttacttagaaccttataacagcgcagcatcaagttgggaaaaagattataatgcactgtatcagcttctaaataataatccaaatcagcaggagaacctggagaagattaaaggaagcattcaagactggattgaagccgctggtgaaccgaccattgcattaaaaaaagaaaataatacaaaagagcttcagcagttttttgagaaagatcctgggcgccagtatatggatgatatacgcagccagtttacttcttttagaaatgtagagaaaaaatcgactgaaacaagagcaacagagttagacgagaaaaatcaaaaaattaaaattggactttacggtttgctgttatttgttacgcttatttcacttgctatcgctattgttttgtccaattccattgtgaatacgattaaagaagttacgcaaacgatcaaacaaattacggctgcaaaaggcgagttaaaaggaagaattaaagttcgatctaatgatgaaattaaagatttagggatagccacgaacgcgttgttagaaaatattgaagagcgaaactggctgcaaacgaacattgctcacgctgtaacgatgtaccaaggcatagcatctgtagacaagcttgcggaaaaatttctctttacggtttcagaaatgacaggagcttctttcggagcattttatgttcgagaagaaaatgataaaggagatctattcgtcaaacaagctgcttttgcagatagaaaaggcgacgcgggaagagagagctttttaataggtgaagggctcattggacaagctgctttagaaaaaagaacccttgtcataaacgatgtacctgacacataccagctcattgcttcaggattaggagacgtaaaacctaagagtatttttattgtacccgtcttgtttgaagatgaagtaattgcagtcatcgagctggcatcgctgcacgaatttacagttttagagcaagaacttattagtcaagtgattgaaacgtttggtctcactatcaatggtgtaatcagacgtatggaaattgcccgtctattaaaagaatctcaggcgatgacagaagagctccaggctcagtctgaagaacttcaaacacaatcagaagaactgcaaatgcagtctgaagagctgcgtatgattaatgaacagctagaagaaagaacaaaagatgcagaagaaaaatcgtttgaattagaggctgcaaaagaagatttagaagaaaaagcgcatcagctggaattgaattctcaatacaaatctgaattccttgctaatatgtcgcacgagcttcgaacaccgcttaatagcattcttattctgtctgaaatgcttgaggaaaatgcggctaaaacgctatctgaagatgaagaagaatatgctcgtattatccattcttcaggaaaagacttgttggcgttaatcaacgacatcttggatttatcaaaagtagagtctggaaaactagatgtcttgcttgctgagatgaatatgagtgagcttccagatcaaattgaacgtaatttcagccacgttgctgaacagaaaaaagtacaattaaaaattaataaagcacaagatgtaccggacatcattcacacagatgaaaagagattccagcaaattgtgaaaaatcttttatcaaatgcatttaaatttacggaatcgggatctgtcacagtatccattcaacgagtagctgaccatcgtcttacaacagctatgcgtacagtagatacggattgctggctagaaatagctgtagctgatacagggattggtataccaaaagaaaagcatcagcttatttttgaagcgtttcagcaggcggatggagctacggttcgcaagtacggaggaacgggacttggcttatctatttgcagtgagtttgcaaaattattgggcggctggatttccctaagcagtgaagtaggaaaaggaagtacgtttacactctatcttcctagtctctctaacggtcttgttgactataaaaaagtaaattttgcatatgaagaagtagcagtatctgtagaagaagctgaacctgaagcagaaataactgaaattgaccatcctatacaaccagttgaaccttcattgcaagatgatgaaaatgtgtttcaggataagcgagtgctcatcgtagatgatgaccagcgcaacatctttgccttaaaaactgcgctagctaaacaaggtatgaccattatgacagctcataacggaatagagtgtcttgaaatgatgaaggatagtgaaccatttgatctcattttaatggatattatgatgccgcaaatggacggatatgaagcgatgcagaaaattagaggagagctaaagcttgttgatttgcctattattgcattaaccgctaaagcgatgaaaaatgatcgtgaaaaatgcttggaagctggagcatcagattatatcagcaaacctttagatttaaatcagctgttctccgttatgcgtgtatggctagtaaattaagcggggtatgaaacatatatggatatgaagcacctagatttaagtgaagacttagttatgaataaaaaaacagatttagagattgatttactgctgacggctatttatcgattaacaggattcgatttcaggcagtacgctaaatcttctatctgtcgccgggtctataatcgaatgaaaattgaacgtattccaactgtatctcgattgttagaaaaagcgattcatgaagaagaatttatgaatcagcttttaaatgatttttcgataaatgtaacagagatgtttcgcgatccaagcttttttaaagcatttcgcacaaaagtgattccggtattaaaggattatccagaaattcgcatttggcacgctggctgtgcaacgggcgaagaggtattttctatggcgattcttttagaagaagaagggttaatggataaaacggtcatttacgcaaccgatatgaacgaagatgtattagaaaaagcaaaacaaggtgctttttctttacgtaaaatgaagtcatatacaaaaaattatattcaagccggtggaaagaacgccttctcagaatattatcagacggaccatcactatgcatattttcatccgtcgctgttaaaaaatattatctttgctcagcataatttagtcacggatcagtcatttaatgaatttcacgtcatcatttgccgaaacgtccttatttattttacagctcagctgcaaaatcaagtgtataatttattttcagaaagcctgtgtgcaaaaggatttcttgggcttggtgataaagaaacgcttcgctttgctgaaggaggagcttcttatatcgagtttgcagggaacgagcgcatttatcaaaagcaataaaaaaagaaagacctcattggtgaggtctttttttattgtgcttgtgcttgaatcataagcacgcacatgtcatcaggctgatttaacttttgttcttctgaaaaaatttcattcataaatgtctgcggatttgtccatttttgttcagtaagcttttgaagacgaagagcagattcattttcgcaagggcccattgattcaagagctccgtctgtaaatagcaaaatttgcacatcgttctcaaagctgacaacagatttctgaacgtccatttcttcaaaaaaccctacagggcagcttcctcgttgaagaggaacgagcatatgttcatccactaacatataaccttctggatgcccggcattcacatattctactgtcttagcttccgtatcaatcactaaataaatagcagtgaaatagtaagggatttcatctttttcgctgtgcaataattccatgtagcgattcaactctgtaataacctgctcagggtctacgagggacttgatagcttctctgagcacagacgaaataaacatacaaacaagcgaggcagagatgccgtgccccatcatatcaaaaagaataattccgtaccgatgctcgtcaattttgtgccaatagtacatatcacctgctaatttaaaagaaggataataagaaacttccatttgaatatctttctctcgtaaagggggactaagtaagttttgctgtacgtgcgtagctaaatctaactcagtttgaattttcttttcatgttccgtgtgccagtcaatttctgctttaaggcgtaaggctacccgcatacgagccagcagttccactttattgatcggctttgtgacgtaatctgttccaccggcgtctagagcttctactaatttgctgctgtcttctagagctgtgacaaagataattggaatatgttttaagcgttctacctgctggattcgcctgcaggcttcgattccatcgatttcgggcatcataatatcaagtaaaattaaatcgaccgaattcgtttttgagttctcatcgtccaggttaagatagtcaaaaagggcatgggcagacgtaagagacacacagttatcgtagccagcgccttttaaaattttttcaatcacaaatagattgacttgattgtcatctactagaagaatggtcatgctttatttccccttattatgtttgaagactaatgattgagtatgtagttttcaagcattttttatactttttctgtttttctatttatctattatacagaaaacacagcgtttagggtattttttaagattattcttttctatttaaaaagcaacttgtccccagaaaaggagataaattactttttatagcaacttgtataacgcaaatatcccgaaagtcagtacaaccgctcccgaaatatgatttacccaaatcaagctgttattcgtaaacttcgaccgggcaagactaatagcaaaactgagcgaaagccaccagcaggccgatcctaaaaatacgcctgcaaccattgtcaacgcagaagcaacatcaaatgctgatttactaatgcctacaccagaaaacacgccaataaaaaataagatcgtcattggattcgtaaccgttaaaaaaagaacggatgtataagaacgaagcaaaccttctcctttagcagcagcagcgtgctctgcaggttgagaacgaaaagtttgtacacctaaataacataaaaataatcctccaatcagctgaagccaaatcttttgggttagtaaaaaggttgtaatgaacgttaggccaaacgcagcgatgcatccataaagagcatctgctgtagctgcccccagcccggatacaaacccatgcaatctccctttagataacgtgcgattaatgcataaaataccgatgggaccgacgggtgcagcaacggaaaagccgatcactaacccctttagaaaataaaataagttcatcttttaagttgctcctaagaagtttttctttagtatagtacaaaagcaatcgtgaatgaagccaattttgagaaagttgttaacacatatttttagtctgttcggttacatcataatgatgttataaaaaacatcactagcaaatttattttaatcattaaaaagttaaaaaactaaattattttacacagaaaattaaatgtagtaaaataattcactgttacatatatagaaagatctaccactaaaaagtagtcattcgtaatgagatgaagagaggttagtcatcatgagtaatctgtttgcaaaaaaagatgttaacaagctattagaggaaaatgcggcaaaagaatcaactaagacattagggttatttgatgtgattttgatgggagtaggagcaaccattgggacaggagttctggttatagcagggttagttgccgcgagggatgcagggccctcggtctccatttcctttgttatttctgcagtagcctgtattcttgttgcgctgtgttatgcagaatttggttcagctattccaagttcgggaggcgcatatacatacatatatgtttcactaggaaaatttgtagcgcatttgataggatggtccatcgtaggatgctatacggtatctttagcttccgtagcgggcggttggtcatcttatgtgaataatgtgcttactgaatttggtattagacttcctgaatcgttcacggccataccaagcggtggaggtattattaatcttcctgcggtatttattgtcctgtgcatgtcgtttttattaacaagaggggtaaaagaaagtaaaaaaataaataacttaatggttttaatcaagataggtattgttctgttatttgtagccgtcggcgtcttttttattcatacaaataactggcacccatttactccttttggtgtgaaaggaatctttgcaggcgcagcttccgtcttttttgcatataacggatttgatgccatttctacttcggcagaagaagtgaaaaatccgcaaagaaacttgccgctaggcattttgattgcactaagtgtttgtacagtcatttacgtagtaattgcattagtattaacaggaatggtttcttataaagagctaaacgtaggcgatgcgttgtcatatgcgctcaatagtgtaggacaagaatgggcagcgctcattgtatctataggagcggttattggtattatggccgtcgtatttgcttatttgtttgtcgtgcctcgcatactgatgtcaatgagccatgatggattattgccgtctctttttgcgaaagtaaaccgaaaaaacagcgaacctgtcatatccacatggcttgtgggcgcgttaggcgctgttgtagctggttttgttgatttaaaacagctggcagatttagcgaatatgctagcgattgtcacgtttgctgccgtttcattttcgattttggttctgcgaaaaactcagcctaacctaaagcgcggtttcaaagtaccttttgtaccatttattccgattattgctattctttgctgtatctttcttatgttcaacttatcaatgaaaacgtggatgtattcaatcggctggatgctgattggcgtctttatttacgttggatacggtagaaataaaaagagcgtttagcaaaaaaaagactctaagcgaacaagctagagtctttttgtgtatatatttatcttgaaagtgagctatgaatataacgtaaaaatttatttgagacatatgtcctttttattttaggaaatgttattgtttaataaaagaaaccgttatgatggagaggaaaacatgagggaaattacgagtgagaaaaagctgatggagtatataaatacttataaattagagtcggttttcaaaaaagagttactaccgcatttgtcactgtatgatgttgaggcaggagaacgtctttgttctcaaggagacgcgtctcactgtttgtacatattggtgaaaggcaaggttaaagtttataccatatcgcccgaaggcaagacgcttgttctttcctttaagcagccccttgaagtaataggcgatattgagtatgtacaagatgttgatattatgaatacggttgaagccgtttcacctttagttgttatcggtatatcatacaaacgattaaagcagcatgcgagcaatgatccacagctgctgacgtttttactggacatgctcacaaaaaagttttgcgcaaaatcgaactcgctaagctttaatttaatgtacccagttgaagtgcggctggctagctacttgctctctattttttgtgaagaatcacatttggttatgaaccaaaaaacagaaagcctaaaagatatagctaatttaatcggaacgacttaccggcatttaaatcgtgttcttcagaaattcgtagcgcaaggagttattgaaaaaaagaaaggctccattattcttaaagataaagaaaaactgagctgtctagcaaacgacaatatatacgagtagacaaagtaatagattagttgaaggagagagagagagaagaatgaaaacataccgaacgcttctatttgacattgataatacgcttttagattttaacgcagccgaagagcaggctttacagcttctttttgctaaccacgatattccgttgactgaggaaagcaaaaaacgttatagtttgataaaccaggggttatggacagcttttgaagaaaataaaataagccgtgagcaagttgtaaatactcgcttttctactctatgtaaagaatatggaatagaaaaagacggaaagctacttgaagcagagtaccgaacgtatttgaacaatggccatcagctaattgacggagcatttgaggtaattaaaaacctgagctgtcactatgagttatatgttgttacaaatggcgtatcggctacgcaatataaacgccttcaggactcaggtctatatccttattttaaagaagtatttgtttcagaagatacgggctttcaaaagcctatgaaggaatattttgattatgttttttcacgtataacagagttgtccgtacatgaaacattaattattggagattctttgagtgcagacattcaaggcgggcagctagccggtattgatacgtgttggtttaatccgcagaaaaaaaagaatgatacaaattggaattctacccatgaaataggaaggcttcaagagctttatattctgctgaacgtaaataatgaagtagcttcggtacaagtgtaaaagtgtataaacgttagaaaacgcaaaaagtgctaaccttttctttaaacaaaaagggttggcactttttctattttacggctttcaaaggcttaaaatctgctagggatattggtctataaataggatggttaaagtaatcaatacaaatttaaacagttttatctcaaaagcaatagggtattttaccaatatcccagataaagtaagtaactaggaggtcgtaaaagatgattaatggcaaaagtttatctcgttcaggaaagagttcatatagaagagaaacagcggttggaaaaacaggaatggtagccagtgctcatccaattgcaacagacgccggagaacaagtgctaaaagccggaggcaatgcaattgatgcagcaattgccgttcagtttgggctcaacgttggagaaccaatgatgaccggtattggaggcagcggcttttttatggtataccacaatgaaagcaaaacaactaaaatttttgacgggcattctcaggctcctaaagcagcttatcctgaaatgtttcttgatgaagataaagaagttattccgtttagaaagcgttctactcatgcaacggcaattggaattccagggattttaaaggcgatggaagcagctcgtaaagaatatggaacaaaaccccttgctgaattgattgaaccggctgccaaagcagcagaagcaggtgtggaaacaaactgggtgcttggagatattttaaaaacatatgcctatcgactaggagaacatgctaagcagctatattccccaaacggcaagcctatgcaagaaggagatatgattaataaaaaagatcttgctaaaacattccgcattcttcaagaaaaaggtattgaggctttttatgaaggtgaaattgcagaagccattatttcaacgatcaaagagcacggcggttttatggaactgtcggatttgaaagaataccagattaagattgatgagccagtgtggggagattataaaggataccgaattgcttcttccaacatgcctagtgcaggaggaaccaccgtgctgcaaatcttaaagctattagaggactttgatgtgtcccagtacgacgtgaaatcttgggaaaagtattatttgtttgcagaagctatgcgtattgcattttcagataaaattgcattctctggagatccagcctacagtgatattccattaaaagggcttttaaatgatgaatatataaaggaacgtcaaaaattgattaattggaagcataaaaatgagaaagttgattttggcaacccgtggaattacgagaaaggccaaaaagtgaatgttgtgcgtcagccttatgaacctgaacgtgagcttagtgaaacaactcactttacggtagttgaccgctggggcaatattgtcgcttgtacatcaactgtggaacatccttttggtacaggaattatggttaaagaccatgggtttttactcaataacgagcttactgattttgatgctattcctggagggttaaatcaagcggatgcaggaaagcgtccggttagctgtaaaagcccaaccatcgtttttaaagacagcgaaccggtactcactttagggtctccaggcggaccaacgattgtagggtctgtatttcaaacgcttattaatgtcttagactatggaatggatataaaagaagccattgaagaaccaagaatttttaatagtacaggatcacttatcggttgggaagccggagtggatatgaatgcaaaaggagagctagaagccatggggtttaattttggagatgagccattcccaatcggaaatgttcaaggtattcaaattgataaagaaaccggccgtttatttggagcagctgattccagccgtgaaggaaaagcaactggtttagactcttaatattcaaaaaatgcattatacgctctctctttttacaaaagggagagcgtataatgcattaaaaaagataaaaatgagtaggtaaaaagaaggaatatttttttttgaaaacatactttagacctttattattatcatcctaatctttagaaaggaaaaagaatagaacgttttcatgtccggctaataaaaaaaaggtactgatttttcaagagattgataaaaacagaatggtcggaaagtataaaaaacggaatagcgttttcaatgctggaaagataaagtgtttaaccatgtagaaagtatcaaacgcaacgtctggaaatcgtggtttgaaatgtaaaaaaagccgtacacttttggtggaaaaacggttacataaaaaaggctcttacacgtaaactttggtcctagttacagctcaatgaaaaagataaaaatgagaaatagctacatttggcatgtttgactttcgtcatttatccaagtaatcttttggttgaacggaaccggttctgttttcggatttttgatagctaattgaattaataaatttatattctttactaacacaaaaggagaaaacatatgaaaatgaaacgagttgctaagcatacaactgctgctacattggctgcagccctactagtaggcgggggatatcaaacatttgctaaaggaaacgacagcaaagactttaataatagctacggaatttcgcatattactcgcgataatatggtgaaaattccacagcagcaaaacagtgatcagtttaaagttcctgcttttgatgaatcaactattaaaaacattgcttctgctaaaggaaaaaatgcatcaggaaatacaattgacttagatgtatgggacagctggccattacaaaatgctgatggaacagtagcgacttatcatggatatcaaattgtgtttgccctagcaggtgatccaaaagattcgaatgacacgtctgtttatcttttctataaaaaagctggagacaaatcaattgacagctggaaaaacgctggaagagtgtttaaagacagcgataaattcgttccgaatgacccgcatcttaaaaatcaaacacaagaatggtctggttctgccacgttaacaaaagatggtaaagttcgtttgttctacacggattattcaggtaaacaatacggaaaacaaacgttaacgacagctcaagtgaacatgtctcagccaaacgataatacgttaaaagttgatggagtagaagattacaagtcaatctttgacggtgacggaaagatttatcaaacggttcagcagtttattgatgaaggcggttatgacacaggggataaccatacgctaagagatcctcactacatagaagacaacggacataagtaccttgttttcgaagctaacacaggaacagaagatggctatcaaggcgaagactctctatataacagagcatactacggaggaaacaatcctttcttccaatctgaaaagaaaaagcttcttgaaggatctaataaagaaaaagcttctttagcaaacggggctttgggcattattgagttaaatgatgactatacgctcaaaaaagtaatgaagccacttattacatcaaacacagttacagacgaaattgaacgtgcaaacattttcaaaaaagatggaaaatggtacttgttcaccgattctcgcggatctaaaatgacgattgatggaatcggacaagatgatgtgtatatgctaggctatgtttcaaatacgttaacaggaaaatataagcctttaaatgatacaggattagttcttcatatggatttagatcctaatgataaaacatttacgtattctcactttgctgtacctcaaacaaaaggcgataatgtcgttattacaagctacatgacaaatagaggcttttatgaagacaaccactctacatttgcaccaagcttcttagtgaacattgacggttcaaaaacatctgttgtaaaagatagtgttcttgagcaaggtcagttaacagtagacgaagactgagcgctttgcaatagcaataaaagaaaatggtgattgtaatcaccattttcttttgttttattcgatatagacaaaaaagagaaaggtgggggtttgtttgaagaaaaaaggtgcttataaatggataacgcttgccgttcttttagttataatagccggacttattataacagccgtatccaaaaaagaggatacaaaagacccaggaaaagaaaaagagaataaaagtgaatccacttatcgcccggtgtatcactttagtacgcctgataaatggaaaaatgatcctcaaaagcccatttattttgacgggaaatatcattactattacttatacaatcatgattatcctaaagggaacgggacggaatggcgacatgcaacgtctaaagatttggttcattggaaagatgaaggagtagctattccaaagtatacaaataaaaatggcgatatatggtccggatccgttgtagaggataaagataacacagcaggctttggtaaagacgcaattgtagcgattatgacccagccttctgccgatggacaaaagcaagaacagtatctatggtatagtaccgatagaggaaaaacctttaaatcgtatagcaaaaatcctatcatgcctaatccaggcaccaaagattttagagatcccaaagtcatatgggataatgaacatgacaagtgggttctcgtcatgtcagaaggtgaaaaaatcggattttatgaatcttctaatctaaaggattggacgtatacgggaggatttgtaactaaagatattggcattaccgaatgtccagatctttttcaaatgaaggcagatgacgggacagttaagtgggttctcgggacaagtgcaaatggaaaagaaagcggaaagccaaacacctatgcttattggacaggaaattacgatggaacaacattcactcccgatatggacgagccgcaatggctcgatcatggcttcgattggtacggaggagtcacgtttgaagacggtaaaaataaagattccttagaaaaacgctacgcttttgcatggatgaacaactgggattatccagataagacgccaacgatgaaagaagggtttaacggcttcgattcagtaacccgtgaaattacgctttcaaaacaagacgacgatcagtacagcctgttatcaaagcctgtcgaagaattaaatcagctaactgattcaacaaactctgttgaacaagtagaagtaaacggagagaaaaagttaaagataaaaggtgaagcttatcagcttgatacagatatttcatggtcagatgcagaaaatgtaggcttacgacttcgagagtccgcagatcaaaagcggcacattgatgtgggcatttttgcaaaagataacgtctcatatgtgaacagaagctatagcaatcagcctgatcaaagcaaaaagtatgtggaaagccgtgattactttaatgcaggcaagaagaatgttcatttgaagatattggtagataaaacaagcattgaagtctttgttgatgatggaaaaaccgtgcattctagcgaagtgtttccgcgtcacaacgaccaaggaattacgcttttctctcaaggaggaacgtctctctttaaaaatatagaaatcaaacatcttcgctctcttcagtaatttccctacttttaaaaagaaggagcagaatatcgccttattgtggtttaggactagatagaaagggtacatgtctactaacagcaaatgaaagggtgtttattcaaatggaagagaaaatgagacaactaatagagggacttaataccgatttagcgggtgaatattcggcggttattcagtacacttactatgcgtctacagtaaccggcctagaatatcaaattttaaaacctttctttgaaggagaaattcctgatgagcaaggacatgccctttatttatcagaaaaaatcaaaaaccttggcggtgagccaacaacaaagccggctgaggtgaagcacgtctcaaacgtgacggaaatgcttaaagaagcgagcaaggctgaaaaagaaactatccagcgctacgaagagcgtaagaagcaagcagaagagttaggtttaacagagcttgttgtaaagcttgaagatatgattgcagatgaaacaaatcatatggaagaaatggaacgtttattaaaagatccccgattaagttgatcatacaaaatacgtaaaagcatcccgtaccaagtgttacggggtgtttttttgcaatttaaaaaggaaataaaacatcatgtacgcatgtttctatcaatgagatgaaagtcatatttttgaaattatctatcgctttgaaaaaatttatagtaaaataattatttggctgcatatggcagcaactatatgcggggcatcacatacatataaaggctaaaagggtatccgtatattgaaaccgcttttatcttctataagaaaaaccatggtatgcccgcagttgcaaggagagagaaagatgaggaaacgaatcatgacagcgctgctgcttgtcactgttttagctgcaatggaaggaaccattgtcagtacggctgttccaagaattacaagtgatttgtcgggcattgagctagttagctgggtatatgccatttatatgctgacaactgctgtatctacacctatatacggaaagttagcggatctattcggccgcaaaaaagttatgcttgttggaatcattattttcttaatcggatcgatactttgcggacttagcttttcgatgcaacaattaattgtctatagagctatccaagggctgggcgccggggtcgttatgccgcttacaatgattattattggggacttgtatgaagaagcaaaagaaagagccaaagcgcaagggtggattagcgcagtttggggagttgcgggagttctcgggcctcttcttgggggattcttagtggatacgctgtcttggcgctatattttctttttaaatataccgtttggactaatggctttttttgttcttttagtaaactataaagaagaagtggtaaaagaaaaacgctatatcgattatattggagcggtgactttttcagtgggaacaattgcgtttttatacgcgcttttaaccggaagtcagcatcaaaactggggagatccgaccattatagggttatttgttctagctgttctaacattcattggctttatttatatagaaaagaaatctcccgaacctcttatcccgcttgaactgttttccattcgaagtgtatctgttataaacttattaacacttcttgtgggatcagtagttattagtattacggtctaccttccaatttggagtcaaggagtgctggggaaaagtgcaaccgctgctggttttgtattaatgcctatgccagtatgctggacgattggttcactgctttcggggaatttagtagggcgtcttaaaacgcactctatccttatgctgggcacggcaattgtaagtacagcttgttttatgctgtttttagtttccacccactcacccgtatttttaatttatgtagccgttggggtccttgggttaggaatggggattattacgcctatttttatgctagttattcaatcagcggtcccggctagcaaaagaggagtagcggtggctcttaatacgtttacaaatacatttagtcaaacgctaggttctgcggtgtttggtacaatctttaatttagtgacactttcacaagcaaagaaattagggcaagaaaatttaaatgcttcgtttgagacaggcggagtaccagcagaagaactgtcaaagctgcatgaaattcttgcatcaggtgttcacattatttacagtggaacgtttttagctgcattactaagctttgctgtttcatgcttattagtaaaaaacggacataaaaaaataaagaacatctctatgcaaaagtaacggaagagattgctacaaaagtattttaattgaaggacaatccgaacgagtttgattaaggaccaaactcgttcggatttttttattggtatggtgaatgtaggtttcatgtatggaggtgcttttagctgttgattcagttatgtatcagtctcttttttaaaagaattatcaaagagagaaaaaaagatattgtctaataacgttccggaaaaatcgttaacaggaggaagaatttttattattgacgaaaatttcttattttttgtttttttagtatggacatttacctagttgtttattattatgaattctataagtattgaattttaagcgcttccaaaagaaacatttgtctttctcaggaatacacttgatttttaattcatatactgtaagtgcttagattaatcttttaatggggaaaagagaggtttataagacgtattgaacaacgatgagggggtatggaagatgacaagcagacgtttaaaagaattcttgaatagtaatttagaagatttaaaagataaaggattatacaatgtcattaatccggtagaggggccaaacggacctgtgattcaaattgagggaaagcaattaattaatttatcatccaacaattatttgggtcttgctacagacgagaggcttattaacgcgtgcaacgaagctactgaaaaatacggagtgggggctggagctgtccgaacgattaatggaactctagatattcatattaagctagaggaaaagctagccgagtttaagcatacagaagcagctatagcttatcagtctggctttaactgtaatatggcagccatctccgcggttatggataaacatgatgcgattttatcagatgagctgaatcacgcttcaattattgacggatgccggctatcaaaagcaaaaattattccttttaagcattcagatatggaagatcttcgtgcaaaagcaggcgaagcacaaaaatccggtttatataataaaataatggtaattaccgatggtgtattctcaatggatggagacattgctaagcttccggaaattgtagaaatcgcagaggaatttgacttaatcacatacgtagatgatgctcacgggtcgggcgtattagggaacggcatgggcacagtcaaacattttggcttatctgaaaaagtagacttccagattggaacattatcaaaagcgattggagctgtaggtgggtacgtagccggaaaaaaagacttaatcgactggttaaaagtaagaagccgtccgtttttgttttcgactgctattacaccaggcacggctgctgcctgtatgaaagcaattgaaatcctaagcacaagtacagagctgcagcagcaaatgtgggaaaacagtcgatatttaaagcaaggattaaaagaactaggctttaacattggagaaagtgaaacacctatcactccgtgcatcataggagatgaaaaccaaacgcagatttttagtgagagattaatagaagaaggggtatacgctaaatcaattgttttcccaaccgttccaagagggacaggacgcgttcgcaatatgccgacggctgctcatacgaaagaaatgttagatgaagcacttcgtatctacaaaaaagtaggcaaggaaatgaaattaatctaaacgtttaatctaggcagtacacgaggaggatattgacatgaaaaaagtattaataacgggttctttagggcaaatcggttctgagttaacgacgaaaatgagagagatatatggttcagaaaatattattgccaccgatattcgcaaaacgacgagtgatgtcgtgacttcaggtccattcgagattttagatgtaacggatcagactgcgttatttacgatcgctaaaaagcataaagttgatacgattattcacttggctgcgctgttatcagcgacagccgagcaaaaaccgcttctagcttggaatctaaatatgggcggattagtaaatgcgctcgaagtagcacgcgagcttcagtgtcaatttttcactccaagttcaattggtgcatttggtccaacgactccaaaagactggacgccgcaggatacaattcaacgtcctaccacgatgtatggtgttaataaagtagcgggtgaattactttgcgattactaccaccataaattcggagtagatacacgagggctgcgttttccaggcttaatttcatacgtaacgcctccaggtggaggaacaacggactacgctgttgaaatttattatgaagccgttaagcataagcgatatacgtcctatattgacaaaggaacatatatggatatgatgtatatgcctgatgcattgaatgctgttatccaactaatggaagcagacggttctaagcttaagcaccgaaattcatttaacgtttctgccatgagttttgatccagaacaaatggcgactgaaatcagaaaaacgattccggaatttgttctgaattaccaagtagatcctgttcgacaagcaattgctgaaagctggcctaaccatatagattccagctgtgcgatagaagagtggggatttaaaacagaatataacctagaaaaaatgacgagagagatgctgggaaagttaaaagttgaatcacagcttgtcttaacgtaagtagagaaaaatgatttcttccttgaaagtaaagtaagcgcttactaaaaggtaggttacttgtttatgcaagttctacttcgtaacagtggtggacagtacacatagatctcctgatcctttaagtgagcgctcgttcgttgaataatcagcacctttttaggtgccgtctgttaaaataataagggggtagaagggagggaatgacagttgagcaataaatttcaacaagttaatgatttttcaatgggaagattaacatctttactcgttcttttacataatacggaactagctgaaggtattgaaaaggaaattaatgagagaggatacagctatacagtaggaaaagtcggagcgatggagctgtctaaagtcgtggcggcaattgaaacgagcgccaagacaaacaaaattattaatgcccagtcgtaccgggaagttcacgctctttatcatgctatacttgaagccattcaaggagttagtcgaggaacgcttcagttgggtgatattttacgaacggtaggactcacattttcaatcgtgcgcggaaaaattgagttttcaggatcaagcgatgaatggattagcgtttgtgtgtatggaacgataggtgcgcctaaaaaaggctttgaacatgatacattaggctttggttttaaccacatttaaaaaataatgaacgaaatagtatgaatgtaaaaagtgagagatgtacatagctgctttaaagaagatatttttcttattgaaaggttctgtgcggcgtgttaacataatgattaatataataactgcctttaagacggtccagagaggccgaaaaggacggatcactcatttactgcttctatgcctatctgtgcccttttgccctctgcgacaaaagggcttttatgtgttacttacttcttttaaacgaagtccagagaggcttcaaaagagaatggagatatgttatttatccattccttcaaaaaagaaagagcgttgatacagaaagaatacactggagggtggaacaacatgaattatcgtaacaagacagttgtagcatcagtagcaggtttgacgttagaagggatggacattatgtttatctcgtttgctatgtcaatgattattgctgaatttcacattgatttagcaacaggtggacttatttcttctattacgaatataggaatgctgataggtggagtcatcttcggaattttagcagataaatttggaagagtgcgggttttcacctacacggttcttctatttgcagtcggaacggcattaacaggttttgcagcaaatgttgaacaagtgtatgcttcgcgatttattgccggaattggggctggaggagagtacgggatcggtatggctcttgtagcagaagcgtggccgaaacataagcaaggacgagcttcatcctatgttagtattggcgcacaatttggagtgatccttgcggcgcttttaagttctctgatcctgccgattttcggatggagagcgctgttttttgtcggaatcatccccgtcatttttgcttttatggtacgaaaaaatttaaacgaatctcctgagtggctacaagctcaaaaagagaaaacagcggttgttaaaaataatggtaagcttcgtcaattattcgctacgcctaggacggcgatgacgactatttcgctggcagtgatggctacagtccaaattgcaggctataacggacttatgatatggcttccatctatgcttcagcaatcacaaggcctctctgtttcaagttcagctctttggacaatcagtacagccgttggaatgattataggcatgctaacatttggtcaatttatggaccgttttggatcgaaacgtacttttggaatctttcttcttgcttcagcttgtgcggtatttttatactcgtatgccgaaggaagtgcagggctgcttataggaggagctgtggtcggatttttctcaaacggaatgttcgcgggatacggagcgttgatcagcagccactattcagtagaagtgcgcagcactgcaacgaacaccatttttaactttgggcgagcgctcggagggttatcacccattcttgtcggctatcttttgcaaagctatgatatgacagtagcgatgacgtacttggcggggctgtactgtatttcgtttatttttatggtaagtcttaaaagaacgggagaaaagaaagtgaaacaaatgaacgctcaatctgctctttaaaataaaagatagattctatgcttttctggaaaaaaccgcgcttattcaaaagggcggtttttttgagtgtataaaaaataaattcagatgttatatggttgttttttcgcagatgctttattaacaaagacacattatctataaaaatatttatggataagtatatattttctaatttgtattatagtaattcctctcttacaatagggtgtgtaaggcggaaacagaaaatactatctttatttacaggaggacgttactatgtctaaacatatattaatggtcgtaacaacggctgacaaaatgaaagaaaatcatccaacaggcctttggctttcagaatttggtgaagcgtacgtagagttcgaaaaagctggatttacgattactgtagcaagtcctgtaggaggaaaagcgccggtggatgctcgcagccttgaaggggagacttctcaagaaatcttaaatacagctaagcatctagagaataccctaaaacttgatacaattacagacagtgctaaattcgatgctgttttcttaccaggcggtcacggcacaatgtttgatctgccagataatcaaacactccacgctttaattcgtgaactatacgaaggagacaaagtagtagccgctgtatgccacggacccgcaggcttagtaggtgttacattatcagatgaaaagccgttggtcgaaggaaaggatgtcgctgcgtttacagatgatgaagaacgtgaaacaacattggaccgcttcatgccgtttcttttggaaacacgtctgcgtgaacttggggcaaatgtagtaactgctccaaactggacagataatgtacaagcagatggcaacctaataacagggcaaaatcctcagtcaacaatcagtgtagcaaaagcagtcgtgcagcacttattgaaataagatataaaaaagcctgtaggctacaagcctacaggctttttttatgaacacatcaagaaagaccgatgtgtatagcatggattttttgctgtcttggactagagaaatcaatcatcatacaaaaaatatgatggtcagtgtaataaattcaaaaaaagggaagctttttatggagaatattttttaaagaaatgaggaaaaacgatgtcagaaattattattaacgccattttgcaagccaagccaggaaaagaagaagagcttcgatcagagttagtaaaagttattgaaccatcaagagaagaaaaaggctgtattcaatatactctccaccaggatacagacaaggaaggcacctttgttttttatgagaaatggaaaagcaaagaagatgttaaagctcacattgaaacacctcactatcaacaatacagacagcaaacagaaccgttaattgaaagcagagcggtacatcgtttacaagaagtacgttaatacaaaaagtggctggaccaaaagtgttttagtggaaagaagatccgaatgaggaaccgagattcttgatggagaatcaaactcgttcggattttttgtggttatggtaaacgtaggtttcatttagtgagaccacgctgaaacctacgcgatgaggagacttatcgatcgcccgcggaaagcgaaggcttgcacggaaatcaacagcggtataacaaataatccatactagctcctttattccacttgttcatctatagatggaattgatttcgttataactcaatctttgtttgttataaagaactaaaaagctgcagaggaaaaataatttcagctgcgaaaagcggattcgaaaagggggaagacagtgaaagaaacaacaaataatagaagcggtgtttgagaagcagacaggcgggtagataaaaattagatgacatagttcaacaattaacaaactaaaaggagagatcaaatcaatgcgtacaaatttaaaacactttattaacggagaatggattgaatcaacaggaaacgaaacgtcagatgtgatcaatcctgctactgaaaaatcaattggtaaaattagcttaggtacaaaagaagatctagataaagccgtggcagcagctaaagcagctcttcccacattttcaagaacaacaaaagaagagcgaattaaaatgcttcgcaatattgcaaaaggatatgaaaagcgtaaacaggagcttattgaagttatgactgaagagcttggcgctcctttaaagatttcagaagaagttcactatgaaatgggacttagccactttaaagaagcagctaatgcacttgaagattacacatttgaaaaagatcatggaagctacaaggtcgtgaaggagtctattggagtaagcggacttattacaccatggaacttcccaacaaatcagacttctactaaaattgcaggagctattgcagcaggaagtccaatggtattaaaaccatcagaacttacaccgtatgcagcgatgatattagcagagatcattgatgaagctggtgtaccaaaaggtgctttcaaccttgtgaacggaacgggaagcacaatcggtgacggtattagttctcaccccgacattgattttgtatcatttacaggatcaggtgctgtaggcgagaaaattatgcaaaacgcggctaaaacaatcaaaaaagttgcgcttgaactaggcggaaaatcaccgctagttgtattagaggatgcggatgtagaagaagcggctaaaatagcagtttcacacattgcaatgaatacggggcaagtatgtacggcagcaacgcgcattatcattcctgcctctatgaaagaaaaatttgaagaagcagtgaagaaggttctcccatcattcccagttggtgatccattaaataaagacaacgtaactggaccgctcgtagcggaaaaacagtgggatcgcgtacaggattatattaaaaaaggaatggacgaaggtgcaacacttcttactggcggaacgggcaaaccagacggcttagagacaggatactttgttaaaccgacagtctttactgacgtttcaaatgatatggttattgcacaagaagaaatctttggacctgtaacaactattattacgtatgatgatctagagcaagctcttgaaatcgcaaatgatacaatttatggacttgcaggctatgcggtcggaaaagatcaagaaacacttgactatgttgctaaaaatattagagctggtcaaatcatcgtcaacgatgccgagcaagacagagctgcaccattcggtggatttaagcaatctggtattggacgcgagtggggagcatttggtattgaagaatatctagagccaaaagcgatcatgggcgttaaagttccggcaaaagtataattgatgtaaaaaaagaaaggagtttttctcctttctttttttatggatacataaaagagagccagttaaaaaaagaataaccaaagcaaaggtggatagcataaacgtgtatcacatatatgaagtgacacgttaaaggagggaattataaattgaatagagagatgcacggaagttcatcaacggaaagtttcattcccatgagctctatagccagtggaaaaggagtcgaagtggcaccggatatctacagctacactacacagattgttaacgtatgttttataggaaatccagacaaagaaaatagttttgtacttgtggatgcgggaatgcctaattcggcttctatgattatcaaagaggcagaagaaaggtttggaaaagaaaaaaaaccaaaagcaattattcttacacatgcacattttgatcatattggatctattattgaactagtggagaagtggaacataccggtatatgtacatccacttgaacttccatatgtgacgggtaaaaaaaattatcctacaccagatggcacagtggaaggcgggctcgtggcaaagctttctccgttatttccaacggaagccattgatttaggctctcacgtgcaagctttaccagccgacggctctgtacctcatatgccggaatgggaatggattcacacccctggtcattctccaggacatatttctctttttagaaagcaggatctggcgcttatcgcaggagatgcttttgttaccactaagcaagaatatttactggatgtactagagcaagaattggaaattagcggtcctcctcgttatttaactacggactgggcatctgccaaaagatcagttgaagtgcttcagtcactgcatccgtctgtggcggtgaccggacatggaaaaccagtttccggagaatggctttcaactaatttattgaagcttacgaagaatttcgatgaaattgctcgtcctgattacggcaagtatgtataaggctaaagaaaaaatattactctttacgcagctcttaaaagctacaggtgaagatcaaaagctctacgaactcagtgagttcgtagagcttttttagtttttcgtataaaagtaaaaaaagttataacttcctttattaaaaattttgctgaatagcctgctgcgcttcgcgtaaatgtcttaggtgttcttccattcgttttaattctttatcactagacgcctgttttttttgttcgttaatttgctgctgaacgatagtcaaatgcatttgagcattttgaaaattagctccattcaaattcatctgcccttgataaacagcctgttcagctaattgtaatgcttctttaatatgagtgtatgaattcatgcctctcatccttctgtatagtatttacagttaacatgcgctggtttttcgcagctatacaaatgatttagaaataaaataaaaattacgtagtacaagctaagcaggctgcatacatttatcatagttcaatttataaaatctcaaaagtaatggaagaagggatgtatgtgggagctttctttagctatgtattattaggactctcgttggcggcaccaattggtccaataaatgcagcgcagcttgataaaggaatcaaaaatggttttttacatgcttggttcttagggataggagcaacctcggttgacgctctttatatgcttgtagtgtattttggatccgttcattttttaagcagcgattttatgaaaacgtttcttttttcgtttggatgcttcgtattaatttataccggtattgaagggttaatgagcgcagggaaaattacacagcatcggaacgcaaaaggagattctgtagtaaagtgttttttttcaggttttttaatttcattaacaaacccgcttactattcttttttggcttggtatttatggctctgttttagccaaaacagctaatacatacgaaacagaacagctcattttatacagctgtgctatttttacagggattttatgctgggatattgcgatggcagcattagcaagcacttttcgaaggtacttagcagcgacatttttgactgcagtttctgttatatccggcctttctctaataggatttggtatatatttcggctggcaggctgtacagcaattgattatttaagaggggaaaaagcagaactgaatttaaagagttttctatctgttgaaaaatagtagaaagctgcctctttttgcgcataattttttcaaactatcacacactacatcgaggcgtaaggagtgatagtatgaaaaagaaaataggctgcggaagtcaggttgaagggaaattaaaatggtggcagctgtctttaatcggagtagggtgcatcatcggtacaggctattttttaggatcaagtattgcaataaaagccacgggtccctctgtattaattgcttttttactagcagcagtatgtacatttgttgtatttgatgctcttgctaaaatgagtgctcaagatcctcaaaaaggttcgtttcgctcctatgctaaaaaggcttatggaagatgggcaggatttagcagcggatgggtgtactggagttcagagatgctgatcatggggagtcagctcactgctttatctctttttacacgtttttggtttgacggtattccactgtgggtctttgcctctatttatgctgttttaggcattgctgttgtattaatcggaacaaaaggctttgaacgaatggaaaatgtatttgctgtcacaaaagtggctgccattttaatgtttattgtattagctagtctcgctttatttggatttcttgaccaaggtgccaaacaaggagtgccacgaacgataagtgaagtatttccccacggctttttaggtttatggggcgctttgctttatgccttttatgctttcggcggcatcgaagtcatgggaatcatgacggttcgtttagaaaaaaaagaagatgcaccgaaagcaggaagaagtatgcttattctccttggaattatttatattgtttcactgagtttagctattttaattgtgccatttcatgattttcatggaaatcaaagtccatttataacggctttagaaacatatcatcttccatttttccctcatgtttttaatggagcaatgattgttgctggtttctcaacgatgtcagcgtcttttttttctgtaacgacaatgattgtcactctttcagaagatggagatgccccggcattgttttcaaaacaaaaaaagaaaaagctgcagtttcctttaccggctttacttttaacaacagcaggattagttgtttctattgttctttccttgctattgcctgggaaaatttatgagtacattacaacagcagcgggactgatgctgatttataactggttctttattttaatttcttttcatcgcttaatcaaacaaaccgtttgggataaagtaaaacaagctgttggcctcttattaatcctgctagcagtaagcggtacgctgttagaatctgcaagcaggccaggtttctttgcaagcttaggctttctaattgttataagccttgttattttaaaactgcgccataagtggaaagaagaagaagccgctagctaacatatatttaatctttatgagggacactatgcacgttgtacaattacaaaaataaaaggtggttatgattatgccaaaaaacaagcagactccttcttcacaagtagatcaaaaacaagtagtagatgacaaagcaaaagcgctacgagaaaataattatgaagatggtcatattcgcaagataactcaaagcggagcagacggccaataacaaaaaaagacgcgttcgcgtctttttttgttgaagtgtatcatccttaccaacgatgagcttttgcattacttcgcaagatgatgttcgtttgagacatctctgtatgtccatttacttgggactttgaacgcttcggtctcgtccagttgtggcggaatagttctgaatgctgatctacttgatttttatcattcatcataatcacctcaaggataggatactttcacaagatatttacggtgaaatatctctcttatagaatgggataaaaaagaagaaatacacctaacacttttaaccatacatataaagggagtgcctattcataaactataaagggcaacttctaactttgggttaagcttcggatttataaagtaaaactgccttagtggggactaaggcagttttttagtggagtaatcaaacttcaataatgacaggaaggatcataggtcttcttttggtttggttatataaaaattggccaagcgttgtcttgatttcttttttcataatgctccattggtgaacatgagctttttgtaattgatttacaattttagtcacttgtcggttaacatcttttaataactgctctgaatctctggtataaacaaagcctcgtgaaatggtatctgggccagacacaattttcccttccgctttattcagagtaataacaataaccagcataccatcttctgaaagctgtttgcggtcacgtaaaatcgcgttgccgacatctccaatgccaaacccatctacatatacattacctgcagggatttttcttgtttgaacagctgctccgcccttgatatcaacaatatcaccgttatttataataaaaatgttctctttttccaccccgacggattctgctaataagctgtggtgatggagcattcgaaactcaccgtgaatggggataaaatactttggcttcatcaatgtagccattaattttagctcttcttgatagccatgtcctgatacgtgcatacctgttgcgcttcctgaaccgtaaatcacatgagccccgagtgtgaaaaggctgtcgacaatacgagagatattacgttcattgccaggaataggccctgctgataaaatgaccgtgtcttcaggaagaatctctacttgtcggtgatttccgctggctaatctagatagagcggccatcggctcgccttggcttccagtgcagagaatagcgacttgttcaggtgcaagtgaatgtacttcataaggttcaattagcatcccttcaggaatggttaaataccctttctctaacgcaactgatacaacgttaaccatgcttcttcctagcagcgcaagttttctgttcgttttaatcgctgcatctacaatttgctgtacgcggttaacattcgaggcgaaagtagaaataatcacttttctctttgctttacgaaaagcttcttctacatgtctgccaactaacttttctgaaggcgtaaatccagggcgttcagcatttgtactttcggatattaaagccagtacaccttcactgccgattttcgccattttatgaagatctggatattggtcattaacaggagttaaatcaaacttaaaatccccggtatgcacaacagctccttcaggcgtatgaaagacaatgccaagacaatctggaatgctgtgattcgttttaaaaaaagaaagtggaatattgcctaatgtaatttctgactcttcgttgatttcaataagctccgtctctgcagataattgatgttcctggagtttaatgtcaattaatccaagggtaaggcttgttgcataaatgggaaggttcaactgttttaaaagataaggaatacctccaatatgatcttcatgaccatgcgtaacaaccagtgctcgaactttttctcgattctcttgcaggtatgtaatatcaggtataatcaaatcaattcctaataaactttcgtcagggaatttagagccgcagtcaattacaatgatgtcatcatcatattgaacggcatacatgttttttcctatttcattaatgccgcctaaagcaaaaatggatagtgtgtttctatttgtactcacacttatttcctcctatattttcaaaatcaatatgcagaatttctactcttagtatgaacatttatttctggtgcattctgttaaatatggagattttatttttatttaataagagggatgcaagtaaaaagaaaagaaggtcattttcctgatactacctcttattttctttttataactccataaaatatagacgttacacatggaggtggatggaatgagtaaacaaaataaaagcaaaaaccaaggagtcagcagcagtgcagctgctgtcgataatgtgaataaaagtattttatcaaacgatattcatacagatgagcttcaaaaagcaaaagtaagccgtcataacaaataaaagaatgacaaccaaaagagcagctttgagctgctcttgataaaatagagatagggaagtgaaaaaacgtgtcagaaaacaaaagttctcaatataaagaagaaaataagtcaacgcctagtcgtcctcttgaatataaagaacgcacaaatcaatcacagagtacacgtcaaatgctgcgcagcattctcgaatattcgagtcgatatcgttaataaaattctacatataaaactgtaaggataagcgggcaatataaaagttgaagcaccgctttaatacaaaaaagcaagcagctatgcttgcttttttgtatgtatagccttatacatattgaaaaaaaaacatacatacggtattttagataaacgtatgtataatggtaaacctgtacatgtattttttgagaaaagaagtgggggattttatgaatttacatgattttgttcatggagtagatccaacaataaagctagttattgaagatgagtttcctggaacgcggtgtgtaggcggaaagtacgttcctagcacacattctatttttttatatgaagaagatattaacatacagtgtcagcacttatttggttcaaatgagtgtttagaatcttatcaatggattattttagctcacgaattaggtcatgcgctagatgaagaccttttatctttgagtgcaaagtttgatcaaacagacgatataggtcttttgtatcgaattgaatgtaatgcttgggagataggagagaaattgattccttttattaattcagaactattctcattcataaaagatcaatcgttagcccattaccataaagagatggagaagattagttagaagaaaaaaagttcctgtgacttgtactataaggaacttttcttcttcgagttgtttattacttcaaatactagttaattattacgctggctgctggatctgccgcctttttttccaatttcctcgtaaaattctttaccttgatttttggaagtagcttctccgcctttttcaccaatttcttggtaaaactctttgtcatgatttttggaagtagcttttccaccttttcttcctgcttcttcacgactcattttttcattctttttattagttgccatcttgcatccctcctaataaatttgaattcatagtctgtcttcccggtcaaaaaaggatcaaactggttattttatattttttctaaaaattagatttttctcaaaattatcagaccacgaagccctgtatagcagtatttattaagttgaaattaatcttaaaaaattttatatgaaatatgatatggttaagagaaataagaaaaaggagcttagaaacatgtcaaaatatgtagaaatggataccgcttcgctgcgacggaaaatacaagaatacaaagaattaatttggagagtagggccaggaagtgaaagaactatagaagctgttcaagagattcaaggaatggaaaaagagttaaaagcacgcaatgcagaatttgaagctacggattggaaaacttttactcaggaaataaaagaaaactacgactttacttattaaataagacacattcataataatgtgatgaggataaatgtctccaagtagaaggctgtctgttttctacttggaaacgatagaagtagtatgaagacgattaagaaaaatgatccagtatgagtgaagcaagtaatccaagtgcagcaatcaatcctgtaatagaccctccctcttcataggcctctggcatcattgtagaacctaccatagcaataataccaccgccggcaaaagcagcaatagcagccataagtgtctcagatgcatggtctaaaaaaacaaatcctgtccatgaactaaaagctgaaatgaacaaaacagctgcccatagtaaaaaaattttctttttagagaatccgcttttcactagaccggtcgtactggacagtccttcaggaatattacttataaaaatagcgataacaagaagccagctaacggttgcattttcaattaagctagccccaatcataatggactctgggattgcatccattacggttcctataaatatagcaattccagaactactcgcagccatttgtttggtagaccgctttcttttattcgctccttgacgtgaaattagatagtctaaaaaagtaaaaacgacagccccggcaagaaaaccaagagaagtagcttttaacccgccgttatgaaccgagtctccaagcagctcataggtagatgctccgattaatacacctgtcccaaaagccataatataaccaattatctttttgccgataggcaaaaaaactgctgccaaagcaccaagaaggacagctgatcctgaaattccgccccacatcgcagcttgccacatgaaaaatccctcctcatctctattttctatggatactttccctaagaagagaaagaagaaacgtaaaaggagaagaaaggatttttttcgattaagtagtggtttcatttcgttcgccttaaaaaatagagtgttctagcaccctgagcctatatttattttaaatattcataaaatttaaattatactgaaataaaaaaatatttcactaagatgattgatttaataaaggtaaaaggttttgttgagtgtttttctgaaaaaaacaattgtatttctgagggaaatttattattataaaataagtaattatacagtcgaatagctaaaaatagaaaaaatagtttagttgtaaaggtactagataaaaatggaaggttttaaaaacgatagctgttccatcagacacaaaaagtatctttcctaacagagctataacaagtttaggaggaggaaatggaatggcagacaaacagctaaaaagaggcttagaatcccgtcacattcaaatgatcgcgctaggcggaacaattggcgttggattatttatgggatcagcaagcaccatccaatggacaggtccatcggtattgcttgcttacgcaatctgcggaatgtttattttctttattatgcgtgccatgggcgaaatgctgtacatggaaccaagcacaggttcattcgctacatttggccacaaatatattcatccattagcaggttatatggctgcgtggagcaactggtttcaatttgtaatcgtagggatgtctgaaattatagcggtaggagcatatatgcattactggttcccacatctacctgcttgggtaccaggtattattgccatgttgattttaggcacagccaacttagtttcagtgaaatcatttggagagtttgaattttggtttgcgatgattaagattgtaacgattattttgatgattattgcagggctcgggttgattttcttcggatttggaaacgggggagacgctattggattatcaaacctttgggcacacggcggcttctttgcaggcggatggtcaggttttttctttgcactatctcttgttgttgcagcttatcaaggagtcgagctaattggtattacagctggtgaagcaaaggaccctaaaaaaacgttaagaaacgcaattcaaagcatcatctggcgcattttaattttttatattggagctattttcgttatcgtgacggtatatccgtggaatgaattagattctttagggagtccatttgtatctacatttgctaaagttggtgttacggcagctgcaggtatcattaactttgttgttattacagcagctatgtcaggctgtaacagtggaatttttagtgcaggacgcatgctttatacgcttggcgtaaacggtcaagcacctaaattcttcacaaaaatttctcgtaacggcgttccaatttatagcacactcgctgttatgattggattggtaattggtgttgttttaaactacatcgctccaccgaatgtatttgtttatgtatacagtgcgagcgtgcttccgggaatgattccttggttcatcattcttatcagccaaattcgtttccgtaaagctaaaggtgctgaaatggatagtcatcctttcaaaatgccttttgcacctgtaacgaattatgtaactattgcctttctactaatggtgcttgtaggcatgtggtttaatgatgaaacgcgtatctcacttattgtaggagttattttcctcgctcttgttgtcattagtttttacgcattcggaataaataagcgtatgatacctgatacagagaacggtcaaataaagaaataaatatgctttttcataagtgaaaggcaaaacaaaaaaacggctgagaaaagccgtttttttgttttgtttaaatgaaagatacaagaaaaatgtcattgtacgctgatagtttggataaactatattcgttcatataacgtaaaggagcgaatgttatgagaagccacagatatattatcaaagattcactaaaagctgatgaagttgccaaggatttggaactgcagctggatataaaccgaatgtccgatgtcagaattctttcggtaaatgcacaaaacgaaatactcgttcaaatgcaggaggagaacgaggaagcaggagatgttattgatgtatttatgaaagagtataaaacaggagaaattattgaatagcatgtaattgagaagaatattgagtggttttgttgaataaataaaaagaaaacacctttattttttattgaaaaagaaacggacgtaagaaaacttcttgtttatcaagaagtttcttttgtatctgaacagtagtttgtatacgtaggggagaggtgatgaaggtgaaaaaaaatggtgaaggccacgtcctttttattattctcggaggtctgtttattttaataggcacactctttgcaaatacttccgtttattttctcatctccggatggatagcagccgtctgttgtttaggaatcagcgctgtactaaagaaagaaaaaacaaaatcagtcagtaaagaggaggaagaataataatttttatataaaaatggaaagtaaatatatgaaaaggaagaatggatatccattcttccttaagtcatggtgtgtatgaaattgtcttagaaacgtccgccgccaagttgttgctcagctaattgtacaagacgttttgtgatttcgccgcctactgatccgtttgcacgtgcagtagtgtcagctcctaaatttactccgaactcgctagcgatttcatatttcatttgatcgattgcttgttcagccccgtatactaataattcattattattgctgcttttgttgtttgccattgtattcaactcctttctgtaacgttaaggtgtgaataaaggaagaagaatatgcaataaactgatatttattttataaaaaacgtatttttacgttgtttgtccttctagaagcttaacgggaaggcagatttcacgaggtatattgctgaattctccttcaatttcttttagtaaaatatcaatggctgtttgagcaatcgattcaatgggctgttgaactgtagttagaccaggtaacaaagtctgactggcctccgttccgtcatagcccacaatttttaaatctcttgggatgttttttcctcttttttgtgcttctgcaactactaaagctgcaagtaagtcatcacttgcaaaaataccatctacttccggattttcttcaaaaaccttagaaatagtttctctctggatgttgcggtcgaaggtatttgaaatttcatacgtgataggctgttttccgtactttttcatcacgttttcataagctttccttcttaagttagctggagtttcgagtttaagggggccgttaatatgaataatatgcttacaatcttttgaaatgagcaattccgtggcttgttttcctccagaatagttatcagaagatacggtaggaatatctgttgataaataatgatccactgcaactacaggaagactttgactttctgaatcaaaaatacctctattataagtaacggcaatcacaccatctacctgatttctgatgagcatctctacatattttttttctttatcaattcgattaagactgttgcaaagaagtactttgtagttaagagaagcacatatactttcaatgtgaaaggctaactctccgaaaaaagggttgctcgtttgcgggacaatcataccgattaaatttgttcgtttattaaataatgaacgtgcaatatcatttgggaaataattaatttctttcattgctttataaacattttctcgcgtttctttgcttatgtaaccacggttatttaatacacgagaaacggtagtcggtgaaacacctgcaatttttgctacatcactaatcttggctttcatctaatttcctcctaatttctccaaaacattgcttttatagtatatatcagacatgtaaaagccttaaaataaattgcaattaagcaaatagctttcagtcgttacgttttcttttgaccaataaaaatctatgtaaagattgtaaacggtttattaaacaatttaaacataccacaaagcccacttttacacctaatacaatctttttttaaaatataaaatgtgaaaccggttgacatatgaaaccggttgacataaaatcatattgaaagtgctttcattttgttagataaaagattttatatcttaagctaaaggggtaactaaaatgaaaagttcaaaaagtttatattggaagctgagtgcatattttttcttcttcttttttacgtggtcgtccagctactctttattttctatctggttagggcaagagattaagttgaacggatcagcaacaggcttaatcttttctgtgaacgctatctttgctttgtgtatgcagcctttgtacggatatatatctgacaggataggtttaaagaaacacgttttattttttattagctgtcttttagtgtttgtaggaccattttatatttttgtttatggacctttgcttcaatacaatgtggtgataggggctattattggaggcttatatttaggagtagcgtttttggcgggcatcggagcgattgaaacatacatagagaaagtcagccgaaaatataaatttgagtatggaaaatctagaatgtgggggtcattaggctgggctgcagctacgttttttgcaggacaattatttaatattaatcctcacattaatttttgggtggcatctgtttcagcggttatcctagtcgctattattttttctgtaaaagtagaaatgagcagttatgaaatggaaaaagctgaatccgtcacgctaagagatgtaggtagtttatttttattgaaggaattttggttttttatgatttatgttgttggtgttacatgcgtatatggggtatacgatcagcaatttcctatctattatgcatctttgtttcctactgaatcgataggtaaccaagtatttggctacttaaattcgtttcaagtatttttagaagctggaatgatgttcgcagcaccgtttattgtaaataagatcggtgcaaaaaatagtttaattttagcaggatttctaatgggatttcgtattattgggtcagggcttgttgttggtccaatcggaatatcttcaatgaaactcattcatgcattagaacttcctattatgctcattgccatctttaaatatttggcagctaactttgacacgcgcctatcttccatcctttatttggttggattccaatttgcttcgcaaataggtgcttcagttctttcacccatagtgggaggattatatgatagcgtaggtttttcccgtacctatttaattatgggaggtatggttttggtatttaacgttatttcgatgtttacactactaaactctaaaaaacatagatttataagaaaagatgtacaagaaaacacgcagattatatagggggatatgatgatgttaacgataaataaaatcgagcaagctcaacattcattaaatgaagcagagaaaaaggtgaatcatcaatatcggttagggtatcatattatggcgccagcgaactggattaatgatccgaatgggttggttcagtataaaggagaatatcatgttttttatcaacatcatccttatgacgaaaattgggggccaatgcattggggacatgtcaaaagcaaagatcttgttcattggcagcacttgccgattgctttagctcctggagattcatttgataaagatggatgtttttctggaagtgccgtggataacgaaggagagcttacgttaatttatacaggacataattatatagacaaagagctggatactttttttcaaaaccaaaatatagctgttagtaaagacggcattacctttgaaaaagcagaggccaacccagttattgctgagccgccagcagatagctctcatcattttagagatcctaaagtatggaagcacgaaggtttctggtatatgattctaggaaactcaacaaagaaacaagagggccgtgttatcttataccggtcttcaaatttacaaaaatgggaatatgttggtgttcttgctaaaagcgatggagatctaggatacatgtgggagtgtccagacttctttgagttagacggaaagcatgtgttaatgatttctcctcaagggatagaagcaaaaggtgattcctatcacaaccttttccaaacaggatatttagttggagaatataattatggaaccaatacatttcatcatgggtcatttactgaattagattacggccacgatttttatgctgttcaaacacttttagatgataaaggacggcgaattgcaattggctggatggacatgtgggaagctaatatgccaacgaaagaggatggatggtgcggtgcgctaacgctcccgagagaactaactttaagagaggataaagtgttaatgaaccccgtccaagagcttacatcacttcggaaaactcagtataatatgctaaccaataaagctctttctaacagctatgtagtagaagtaaatgaagacttgctagagatacaagctgtatttgatttagcggactgccaagcttcatcggtaggaataaaaattcgtggaataaacaacgaagaaacgcttatgtgttacaaccttaatgagcaaaagttattgcttgactgtactcactcgggaaaagaagatggagtgaggaaagtagcgctacaagcaggtgagacactagctttacgaatatttgtggaccgttcttccgttgaagtatttgcaaacgaaggacaagcgaccatgacgagccgtatttatccaaaagaaagcaggcttggaattgagttatttactgaaggaggaaacgtaatcgtaaaagagttaacgtattggaatttaaaagatatttgggggtaaaatacagaggaagaagtatattaatacttcttccttttttgagcatttaatagctcgtcaacaaagtggaggtatataaatggataaggcactttagattaaaagtacgggcaaatacgatataatagtaaaagagataatgaatgaaagagcaactgtcctgctctaagatgcccagaagaaagcaggatagagcaaggctactgcgcttataaaacaacgatcagtaaagaaagaattatgttttaagacacaaaaagaaaaggagatacgatgactaatcaaaaagaaacaggatggaatttacgtaatagctatgcggagttaccaaacatcttttttacccctcttgatcctaatccagtgagttcacctaaaatagttaaatttaacgactctttagccgcatctctagggttacaaaaagaacagctgcaaagcccagaaggagttagtattttggctggaaacagttttccaaaaggtgctttcccgcttgcacaagcttatggggggcatcaatttggccactttaacatgctaggagacggccgggctttgctgataggggagcaagttacgccttcgggtgagaaagtagacattcagcttaaaggctcaggccgaacaccatattcccgcggaggagacggccgggcagctctaggacctatgctgcgtgagtatattattagtgaagccatgcatgctcttggtattccgactactcggagcctagcagtcgtaacaacaggtgaatccattgttcgtgaaaaagaactgccgggggcgattttgacgcgtgtagcttccagtcaccttcgttttggcacatttcagttcgctgcaaaatggggaacggtcgaaaaccttcaagctttagctgactatgcattagaacgtcactttccccacatagaaaagaatgaaaaaaaatatttatcattgcttcaagaagtgattaagcgtcacgctaccctagttgctaaatggcagcttattggttttattcatggcgtcatgaatacggataatatgacaattagtggagaaacaattgattatgggccatgtgcatttatggatacctatgatccagaaactgtatttagttcaattgatgtacaagggcgctacgcttatcaaaatcaaccaggcattacagggtggaatcttgcgagatttgccgaggctttattaccgctattggatcaagatatagaaaaagcagttgaaatagcgcaaagcgctgtgacggaattcccaaaattctatcgggaaaactggctggcaggtatgcaggctaaacttggtctttttaacgaagaaaaagaagatgaagcattattccaagaccttcttacaataatgaaaacctataaagctgactacacaaatacgtttcgtgcattaaccgctgaaaagttag
